United States Patent Application Publication US 2014/0230087 A1 - sequence listing, part 21

SEQ ID NO: 13860 - DNA, 1198 bp, Mimulus guttatus
  Intron number 3 from transcript mgv1a001320m (locus mgv1a0 01320m.g) derived from phytozome v7.0 (chr-ID scaffold_236 ; pos 225346 to 226543 reverse strand)
gacaaacgttttctaggtaggttgatgctcttatttattcatgtatatgtatgaattctttgcctggactgttttctccttcctcattcagcttgaagaactgtacgcgtctctcctttttctgattttattgaatttttcttagtattattattattattcatgattggcatgataccaattgaattcttttgagttgatcatccttctaattatgtgattttcatgtgtatgtttatcttttcattatattttgggagaggagtgcagtttcttacaatgtggagaggaaaacaagatcaagatataatcggcctatttatgcatgctgaaagttgcattggtatacaatgcataagttcacattacatgttcttaaaatggtaaaaatgtacttgaaaggacaagaactataggttttgttactgaatctaggttctctttcattaggttccgtgttttttttttttttttcctaatttggttcatcaaatagtaataaaatggcattttacccatggtttaattcttttatgaagattgttgtaactcttctttcataattgatatctaaaaaaataataaccatttaatatgcaaggaattcaaaactaaaagttgtgtctcctttctttgttatgttctctgtaatgcttatgacttctaagttgcttctttcttttagcatctacctagtaggattgatctataacttcctttcatgaacttgaaatgccaaacttggatatcctagcagttcacttctttggcttacctatcttttaacttgtagaggcgaaagtggtgaaatgattatttgctgatacaaaatggaatgtcaaattaatttgatagcacaaagtttacgatctgattctatataatgcattagtaccgcaagtttttctaatatttcattggcaattttatcttgaaaagcctacctgttctaaaatacatttttggtgatgtgtgaaatatttcagtgaatctttcttttgtaggttgggacttgtgttggtatagagtttcttgccagcatgtattctctgattttttatgtgaactaattgctggtgcagaaatgatttcatgcatgagttctgtcacattatcttttcatgagtctaaatgaacattattttctgatttttttcttggtaatgatatccagttggctttggcagccattttcagc

SEQ ID NO: 13861 - DNA, 729 bp, Mimulus guttatus
  Intron number 1 from transcript mgv1a026549m (locus mgv1a0 26549m.g) derived from phytozome v7.0 (chr-ID scaffold_66; pos 945833 to 946561)
gggtatgtaaatatctaccttcgtttttttttttcttttttaattttcacacggcaaagtattcgttacttagggtttcgtagaatctacacccctgatgaaatacagtaatacactatgtagtcttacattattcatcgacacaaaaataatacacacacctgtatgtgtgtttagtggataattatttatgtagatctacggtttaaaacgttgtcttgtttaacatgcattaattttattgatttagtatttttgttcccactatttcgacggaatttttagatttttatttgtgtataaattactcttgtcgtgccaaaatatttgttgcttttgtaggacttttttttctttcaaattagtgtattaataattttaatgatttagaatttttattttgcccttattactattaattagagaataattaatgaaaattataaccagaaagcatattttaatagttttcttaatacatgtccaaaattaaagaaattcttctaattttgcttatatggacacatgcaacaatatatataaatatatgtcatctaacttggtttataaagataattgaatttaaattgaaatataaaacaattttatagatgaaatccccaattacgcaccaatctaatgtgtgtatatttctattttttattctgcaattataaaattctgactccgccactgattttgaccaacaggggacccggtgtgacagtc

SEQ ID NO: 13862 - DNA, 1458 bp, Mimulus guttatus
  Intron number 1 from transcript mgv1a009210m (locus mgv1a0 09210m.g) derived from phytozome v7.0 (chr-ID scaffold_2; pos 2363415 to 2364872 reverse strand)
tgactcaaaccggtaccagtcgcgccaaacaaaaggtaatcatcctctaactgaattccactttagttactatataccctcacaaaattaaatattagaatatagctgctgttaaatatgtgcctgctgatttgattattagttaatggttaaaatgctattatgattgttaatgactctactaaatattcaaagctgtgtgattaataatttagaaaattagtatgggtggttagtttgttaacgttgtagggtaggactgaacacttacaagtattaatcacctgattattaattattaattgaacaacacgaaagttgacatacactttacttttttattttttttaaataaatttatggtgatatataaagtgttggtgataaagtaggatttaggtgggattattagtttacaaggggccatggacaaatcttgaccttataatcatggtttacgcgtagggtttcttataaactaatcgagtcgtgcaagtaaaagaatttcttcttttgtaataaaaattatgtatgatttgtgtatttgagttagtcgaaattatacaatgtctagtagattgttatataacttatattgctgttctagagtagaatgacaagtaacacaatgcattccgatgaaattgacgattaccactactatacctacatcgataagttaataacctcgtttaaataatatatgttttcccagtcccaacttgacgacaattgttaaagaatatatcgttaagttaatatttcgttaaattaatagaatttggtcgatcccaaactttattactttatagagttttaatcgtagatagcaaatattaatatatatattgaccaggctgaaatggccaaaacaataagtgaatgttcaaccttgagtctgaaaattgcatgtatttgaccaggcttaaggcttttactttctctactttcttgaaaaagtctccttattttttttaattttttttttcctttttacttttttgtattaacaaactgaccaaaattaaatataggcttgatcctatgtttatgattatttataaaattatattacatatatatatagacttttgactttgtcggttcttactaatttgagttgttacttgttactacagtaagaccatttgctgtggcatattagttatatttatagagtctgaactgcaagtacatgttttagattgagttttgaaaaatgcaacctgaaatttaataccattaattgccataattttaaagaataaaattgaaaacacagattttttttttatttatttatttgaaaagaacatggcagataataattagtaacatggttgtttatatatttaatttattaataataataataagtattaattacatacgtgtgggtggtgtgttgtggtttgttggacaggcggaagcactgattgagcttctaaggcagccaag

SEQ ID NO: 13863 - DNA, 750 bp, Mimulus guttatus
  Intron number 2 from transcript mgv1a018928m (locus mgv1a0 18928m.g) derived from phytozome v7.0 (chr-ID scaffold_17; pos 143001 to 143750)
ttgtgcgctcttgatctaactttattagaagtgtaatatacttgaatcgaaatagatcaatgagtgacaatgaactgacgagaagtgtgaaaggatagtttatttatttattgatacgagggacaattaatcatcaagtaatgctactacataggaacgcgcatgtattatactcaattcaattgcgcgagaacttcttagtataatgccgattagtcgtgtacatcatatagttttaataggattagaatgtactttcttggtacagtatttcagtagcatgaacactttcttttgccttttcgaatgttagtggatatgaaatttgttcaaaatattgtcctttgggctttggagtttttttgagaactaaaatttgtagttttcttgaacataagcctctattccaaattaagtcagtttttccttgtcgcacttttgtttttagaaattcaaatcctgttataaattggagaaataggggagggggcaggattcgaaccctagacctctactcgaatagtagaggctaggtaccattgtcactctttaagtaactggcacccttattccttatcacatatagtgattcttgctatttgtagatcaagtcgggaaacttaattttcttttctttttattcgtctttgtttaaaatttatgatgcagtatattgatgtataattatgtttctgtgtcaatttgtttgatatagatccgaccattgtggaggcattactttcagaacac

SEQ ID NO: 13864 - DNA, 2877 bp, Mimulus guttatus
  Intron number 2 from transcript mgv1a023046m (locus mgv1a0 23046m.g) derived from phytozome v7.0 (chr-ID scaffold_140 ; pos 686562 to 689438 reverse strand)
ccaaaagagatttaaagctcacaaggtagacgaaagaggttttttggtttttagggtccaaacaaatttttatttaactaattaatttatagggtctttctagggtgagaccacccatgttctaaacttatttgagatatgcattaatcaccattaattttctaagattaaatctggaacgtaggaaaataaaatggcttatgttctaaaaaatgaagtattttaccaaattatcctttgattatttcttttattaaattaatataaaattgattaacattgaattgtctaatttaccccctactatattttaattaaataattaatttaaattcattgtgaccgagttttatttgataaataatcgaaaaaaatgcgttcattagaaatagaacttgtgacctcttaatacatttatcactcctaaccatgcaatcacattaacttattatgatatatttaatcataattgtataaatattgttaatgcaaatattaataaagttaataaaataaagtttggaaaatataaagaattgcaattcaatacgccaaatatctatcattaattatatagtattagaagtattaataaactccaccatttaaaaatgtaaagaatgctcaattaaatataaaaaaatgcataacttaattcaaactcacttatgttatttaatcgatagtgtggcaaatccaaataaaaaataaaataatatgtttatttagaaaagaaaaaattataactcattccaattagtagttttcttactttaaaataaaattatatactacaaatactatattgtgaattttcttttaatatttaatttaatcaactagtaagatttgaatcgatgaagtacaaatcctttcaattagtaaacattattcaaatatttgaatcggttgcttaactattgacataacatgttacataattgatttaactatttataagtaatgtctaatatctttttaattcaattttgtcataaaaaataataaatttaattcctaacacatgtaagaacctaatcgtaaatcataatattttatcaaagcgtaatatttgaaccgattaagctcaagtcctttcaattcgtaaacattattcaaatatttgaatcgattcattagcgcgctcaactattgacaagaacgtcttaatcaaattaactattattaattcaagtgtaatacatttttaattccattttatcataaaaaaataattcttaaattacgcaagaatcaaatcataagattaattaaagcgtatgatttgaaccaattaagcgcaaatccttttaatttgtaaatattattcaaaaatttgaatcgattaagttcaaccactgacaagaacgtattaatcgagttaactatttataattaaagtctactatccttttaattcaatgttaacaacaaaataataatttaattggtaaaatcgtaagaatcagatcgtaaatcgtaagatttaatctaaccatgagccgattaaatcttacgatttttacgaattaaattttattattttttatgataaaattcaataaaaaaggttactaaactttaactatacacagattgattaatacgctattgtaaattattgagtttaaccgattcaaatatttgaatattgtctacgaattgaaatgagttgaacttaatcgatcaaatctttgaatattgtttttgaattgaaaacacatgagtttaattgattcaaatattacgaattaattaaatcttacaaattacgattcagttcaaacttcaaattctttcgaaattcatttttaaattacacgagttgaacaacatttccttagatttttaaattatattatataaagatttgttagtatgggatatttttaatatataataaaaataattatatgagaattaataatttatttaacattatttacataagttttatgaccattataaattgtagccttttgttatatatccgtattgttagtttattgtcaattatgtgttgtgtcttaatggtaagtattcttgtatatttttagatggtcacaagttcaaattcaggttgatgcaattttcgatgggtgatttaatgatttttacgaataatgatataattgatttaattcagcaataaatatatatttaaaattgcattaaaatagagagggttaaattgacatttcattaataatttataattgctgatttttttaaataataattgtaaaaagggtaattgcgacaatacataaatggagaaaaaataggtttttttgctggaacacgtgtcgcaatttgaaaggggtatctcataaaagtttagaacacatgatctcatggtagaaacaccctaatttataatatattttttgagtccccttttagatgaatcttactgaaataattattattctagaaataatttttaaaaaacccaaaatcttattattacttttcaaaaaaatccaaaatccaaaatcttattaaaaaaaatataaaatttccaaaattttctagattcgcgcttcctcttcgttttttttttatccttttgttaggatccaaatccctaaagcccgaaatttcaagtgtgtactgacgaagaagaattatttaatgaactaagagtactgagataaattttgctgagagaagtgaccatgacaatcaaagttttaaactacttgaaaacgatgggtattttagttttctaaaggctttctatttatagaatatattgtgaagatatggactacaattgcttctacataaatacattatatatatatatatatttatatataattcttattttaaaataaaatgagttggtaatgaaataggataccaaaggacata

SEQ ID NO: 13865 - DNA, 970 bp, Mimulus guttatus
  Intron number 8 from transcript mgv1a008236m (locus mgv1a0 08190m.g) derived from phytozome v7.0 (chr-ID scaffold_1; pos 1341222 to 1342191 reverse strand)
ggtaactctctttctctctttccctcggaaacttcctatttttgagttgtatttatagtaggaattttttgaatgagaaactatagaaatcatcagcatgcatgccacttgcgcatatcgaaaaacaaaattctgatagagaaaaatgaattaatgtcacaacgagtacaaactaagttggaaagataaataaaggcctctagatccctcgattctgtacgtcactgctaaatcaaatccattcatttcttggtactatcacaggttcatcagaacacactccaaattctcgaagaaattgcattttagcgttcttccacactaaatgcagtgagtcgttttttgagacactgagtatcaatatactaggagagattagattgccttctttcgacatacatgatattcttagcaaacagcaagtagttcacatgttgctagctatagtgaatttgtagttcaactctgaagaatcgaacttgccgtacgaaatcgttataatagtgaatctctttgtttgtatagtaaggaagttctacaatgtaatcatgatcacataaggctgtatggggtgtcaaagtagaaagacaactagaaatttttattgaattttaaactgcttgaagattttgcgagtgatgcataatcttcctattcatgatgaagcaaatcaagaatggtgttatattttgagttgtacactattttttaatcatgtctaatcaatataaatgatgattatatataaataaataaataaataatgggtgggcaaacccatgtgtgggattgggcctactgctttttgcaatgtgatctaacacatcataaagacccttctaatgattctgatttttgtaaaccactcaaacatagtttgtgcaaaaaaaaaaaaaaaaataattacaaaaaattaatattattttaaagataatgattcattttatgctagaaatcaatcgagcatctg

SEQ ID NO: 13866 - DNA, 2087 bp, Mimulus guttatus
  Intron number 1 from transcript mgv1a017654m (locus mgv1a0 17654m.g) derived from phytozome v7.0 (chr-ID scaffold_41; pos 484011 to 486097 reverse strand)
ttgaccctgatagaattgaggttattttatgtacttagttttgtttagccttaaccttagctttcctagtaaaacatggaaatttcgcgtaaaatttcttatatgcctactgatacgcgtaaaacctacgtatgaaaaaccgcaagtgtacaatatcacgttttgtagaatagtgaattccagatatcgatccacatggaattaagttcctaaatctaccaagtaccgtaattatactatcctaaactttatctagacgaacgagaatggaggatgaaataaaactaaaaataaacaataaataaaaacaacggtccgccagtataagcgaggaattccgacgtgtgatggtttctagggtaaaatccaccaatgtactatcgataaagatctacaaattcgaatctaatgtcaattctatattcgctaacccagacactaaaattctctaacccccgtctccagtgtagttagagtctacccacaggtccgacgtctccgttcagaacctgatattaagagagcatttaggtcaagtccttaagggctacccgaggtgcatcacgtctccatttccacaacccgagctatgttttcctaaaatcaaacgagaaatcctctctcgagttcatttcatttacaatcaattcaactgttggccaaacaatcgatagcatttaatacaggaaaacataaacagaataaaataacgacaaatagatcacagatctggaaatcgaaatcaatatatacaaggtttcatttccctaaaagaaaatgctcagtttattacaaacatagcatccaaatgaagaacacgagaaatcataaactaagcgtaaagaaaagcttatgaaaaaacccgagtcgaaaccctcgtcgaagcttcccgcgaagaactggcaaaaatcgaagagaaaaccgaagaagaagtagagagatatgtcttgatatcgaaaaatgaagaagagaccttctatttatagtaagaaatcaaagaaaaatatctcgtctcgaattctgtgcccagatcgcgatatggccttgcccgattacggtacgggaatggtggatcgcgatctggttcttgatcaaaaactgttctgtgagacccccaggctggatcgcgatctgggtcctgatcaagaaagccttctgtaagaccccccatatcgcgatacgggaaggctggatcgcgatctgggcttctgcatcaacttcaaaccctgttttgacccttttgtagcccgaatttgacaatttttcatttcacaaaagtgttaggccttgaagttagttgtctgtctcaaaccacttgaatcagctcaatcggaggtcgtatgcgaaagttttgcttgaaataccaaacactgtcataatccgcgagaatgcacttttgcacgtgtttggtttgattttcggcttcgcttccaaaatcgttccgaatcggcaaaaatagcttctctttacctaaaatataaataaaagaaaaacaacataatatatacaaataaagccgaaaactcggacgaacgaagaccaaaactcgaagaattaataagtgaaaatcatgcaaaatgaacacttatcacctaccggaattgtttcatgtatcttctgccggaagcttactcaaaacaatgacttgcctattgtgatttctgtatctagagcaacaagtcgaagatactactgatgcatatgttgaccctgatagaattgaggttattttctggacttagttttgtttagccttaaccttagctttccttgtaaaacatggaaatttcacgtaaaatttcttatatgcctactggaattgtttcatgtatcttctgccggaagcttactcaaaataatgacttgcctattgtgatttctgtcgaattgctttaatctgctatgctgatactatgcttctgatgaaaaagggaaaaaaatatgtctaagccgactttattattttcccgaactgttgcatgaggtggtgtcccgtgcttcatttagttgctttagagtcccgaaaatgtactaattcaggtgttaaattgttgtgatatgttttgtgatgcagtcacgctctttgt

SEQ ID NO: 13867 - DNA, 1341 bp, Mimulus guttatus
  Intron number 4 from transcript mgv1a010517m (locus mgv1a0 10517m.g) derived from phytozome v7.0 (chr-ID scaffold_7; pos 2790922 to 2792262)
ctcaacatattgatagccgggtaattttatcttacaacttttttttttctttttttttttctaaatatatataatttatttttttaattttaaattagcatgtggaagacccttctgacctaatgcacgtgcaaaatttaggatgtcacttctagaacgaatataataaatcaaagctaaatagatagttgaagtgcaattgagaatacatgaacttgaattttgcaagaagaatgagaggaattgtgtaatgaaaaccctcaaaatccaactattacaattggatcctagtaacattgcaatagaaataaatgcactgcaaattttaagattattcctttttttttcttcaaaatttgaagatattcaccagctgagtgtttggctattcttggaagttggaaccaattatttaaagctattgctttggttatgttttcattttacttttattacaaaatgaattagtgtttgtttagtttcttaaagccaaatcccattttttttttaaggtaagttatagcattcctatgatgtaaagatcaaattaagaaaaaattccgcatgtttgattaattatggccaccctctccactatgaatcttcttacatgtccacatttgtggtgttaaatttagtggaatcttctagattatgtcgaatattctccagtttgtactcgttttaccccgttcgataattacattttaaaacaagatgatcataagacgtgtctcttgacttgtaaatatcagattgtgatgcatcagaaactgcatttttgcacaaaacgagtacaaactagagaacattctacgaaatcgaaaagattatattgaattcaacaccataaacgtgtaagaagattcataattgagggatagttgtaattacccaagcataagtgatttttttcatcattttaaccttactcggagggttaccgtaatttttcttctttttttaatgtctctctctcatccggacatggtttaattcctatggtaaaaagatttgacaactacaataaaaaatattttcgctaagaaaaattcatccaaacaaaatttaactgctatgataaaaaattcacagtaaaaattttcgtgggacaaaattgggtccactaggtgaacaatattcaacaccccaggtgccaaaagtctactaaatccacctttttaacaaattccatagtggaatccattattttaatgaaggtcaattgtttttctaaaaaaaatcaataattagcaatgattaaaactccacaaagaaaagtgtacaaataataatcccatttgtgttttgatggtacacaggccaagcacaggtgcatca

SEQ ID NO: 13868 - DNA, 1189 bp, Mimulus guttatus
  Intron number 1 from transcript mgv1a006904m (locus mgv1a0 06904m.g) derived from phytozome v7.0 (chr-ID scaffold_211 ; pos 205993 to 207181)
tgcagtacgttgttgcgtttccggttgctctcaaggtttggcttcttttttctccttacgtatatggcgaagcattttcgattacgagttcttttggttatatttataagtagttgtattcttggttaagtgtttcgtagtaattgatgttgaatgtattcgattgtgcgtgtttgtgtactttaggcctcgttttttagaatgttcgatggaatcgataagaggttatcgaatatgagacgattttatgatcatgaaatgttcgttggaatcgataagaggttatctaagatgatgcgattttacgatcatgaaatgttcgatggaattgataagaggttatctagctaggatcattcgcaaagttatttttgttcgatttgagggataaagaagtaagataatctttattgattcgaactctaaaacttggattagataataacaagggtaaattacagctacccctgagatgatgtcgaattacgaaataaacctctcttgtttgggtaattacaaccacccctcgtctacttgcacgtccactcttacggtgtcaaatttagtggaatattctagattatatggaatattctccagtttgtacccgttttaccccattcgagctctacattttaaaacaagatgatcaaatgatgtgttcttggcttgtaattatcagattgtggtgtatcaaatactgcatttttacatgaaacgagtacaaaactagagaacatttcacgaaatctatagaaatatgttgaatttgacaccataagggtgaatgtgtaagaaagactcatacttgaggtgtgattgtaattacctaataggagggggtttttcgtaatttgacctaacctcaaggggttggccgtaatttaccataataataattggtcgggccatgactagtagtcctttatttgcatgatagataatcgatcctaatattatctcgggctgaaataatacttcccaagtacttggttttagcattgtatgattaaataataaatcttaccttatccacaatggcaaatggattttgaaattgaattcttgcctgcagaatcgaatgaaagctaattctttgaaactgcagataatgtttttcgaatttctttgtttattgttgtttgaaaactaaccgacatacgcctcccaatgtagtgccacgtcattc

SEQ ID NO: 13869 - DNA, 1245 bp, Mimulus guttatus
  Intron number 2 from transcript mgv1a013498m (locus mgv1a0 13256m.g) derived from phytozome v7.0 (chr-ID scaffold_21; pos 129447 to 130691 reverse strand)
ctgaaggttgtcttcgattactctgagcacatgcatttgtatagttgatggttatcttggtttatttttttaaagatttgattttatgcatggtttcaatttttgatctgtatttgttttagatgagttcttgattggcagaaatcgtgtgtttaatgtgttcatttaattataaaaaaggggtaaaactttcaatttggtcaccgatatagaaactgtgaattggattgagcctagaaggaacttaattgcatgaactgtgtcgataaatgtgattttttgacaaatggagacgttgtgatatttaatatgtttaagatttgtcggatccgttgaatcccgccttttaagtgttgtataaattgaaagtggttttttgtttttatcgtaagtgtgagatactttattaatgcgaattcattgagcgtcaaacaaatgtctcgtgattctgtagttgccacaacacgtggagacttgtttagctttgctgtcggaatcctgatatgtcgtagtagacgacatttgtcaggatcacttttgtcgaatctttgactttattgcttctattatggaatatggagtaaatataacctaaacacggagtaatacgattttctattaagtacattattgttatgccgaagataaaatagatacatgattttggtgtatatataactacatgcttatttttgtatattttcaataaagagtcataaaccgtatatctcaattattgacatctatcgtgtccatcagatttttccttattcagacattcacagtgcagttattagatataaaacctgagtctgaatgtgaactcgaggcatttcaattacacaaaacacaaatacttgaagaaatagctcgattttcacgcaaagtgttggtttagattttattttttgggaagcaataaaaaactgtagtattgaattgcaaagtgataaatgcatgtacctgttttggaggctatatattattgctttcgaatgctttttgtttgtcgtaaaatcctgaattacgaggtgacaaatgcatgtacattttttggaggctatatattattgctcgctaatgcttttttttatttgtgggaatatcttggagctcattcattattcttagtagttcattcagtctcactcttttatactctgacaccggttctcaatcattaactagaatgtcattaaactattgattaacaaaatctttcttcttcttttggcttgtcagaag

SEQ ID NO: 13870 - DNA, 1189 bp, Mimulus guttatus
  Intron number 1 from transcript mgv1a003549m (locus mgv1a0 03549m.g) derived from phytozome v7.0 (chr-ID scaffold_16; pos 188906 to 190094 reverse strand)
cctcccaccaccaccaatacggccctcgatcacaggtcatttttttttttttttttatctcagatatttgttccccaaacttatttcataattgagctacctagttagttatttcctgaaaattattatgatatgcgctcgggttattcagagttcgatcggggagggtgggcggcagggtaatttaaactcatataacagtttattgattcatagcatttttcttagataatttgaggatggtatgttattgtgtaacacatgtttaaagaaggttttatttataagcggtatcttggtgatgctaatgattcttgtccaggtaaaatccagccatttgtgcgttcgtgacttattgatattgtagttgatttggtgtgaaatagttttggtagcgtttatgaggataacaatgggtattgtactttgggaaacgtgatacggtgtattctttaggttagaagcttcattttggtgatttttatgtgcataatcattgatttctgaaattatggaaaaaaaatttgagttctttcccggatttattccaaactttccattttgagctgatattgggtttgttgccaactttctattttgagggtagtaaaattgtagaattctaggattttggtcgggattttgactatggtgcatttatatgtaaatgtgaatataactatgtttgctgttgagggggtgaactactcggcattttagttgtagatcacaattcatgtacttcccgattgctacttctatgataatctttccctctagagttaaaaagttacacctctttagtcttttctaatcttattgtaacttgtaagtctcatttgaagttgggtcttgaggtcccctggtagttcaatgctcaataagattaatgtacggcaacctgaagttgctaaggccgttttttcttgttttgtgacgttgaagttaaaatgatccatttactatcatttatagtcagaagaacctttatcgtagttatgattacgcaaacgtctagtgccttttatatatgcttgtgcttatttattattattattattattattattattattttttttttttgtcctcttatcatgttgctggtgttattattattttattaattcattctggattgctatttaaagtgtttttacacgtctctctcagaattataaaattttaa

SEQ ID NO: 13871 - DNA, 435 bp, Mimulus guttatus
  Intron number 9 from transcript mgv1a001949m (locus mgv1a0 01949m.g) derived from phytozome v7.0 (chr-ID scaffold_29; pos 1859287 to 1859721 reverse strand)
actaccggtaattgaatttttaatatccatcttacggtaataatcgtaatattacgacatgcttcacgaaatttgcatgcttcggcttttttaactttttcgacaaaatttgtattgtttagatatttatcatataaatttttttataatgcagcttttaatgctaattttaccatttaaactactaaacatacaaataatttactaaaatcacacgaatcacgtgcaacgtctcacttactagcgtttttttaatgtttcgtaatttaatatggtgctcgtttgtcaaagtttagacaatattttatactcgttcgtcactagatgaatacattatccacaaattttctcctacataaatttttattctaaagaatctaacttcttaatattcttgcagcaactactttggacaagaacaagaaagctattaca

SEQ ID NO: 13872 - DNA, 1690 bp, Mimulus guttatus
  Intron number 3 from transcript mgv1a001544m (locus mgv1a0 01544m.g) derived from phytozome v7.0 (chr-ID scaffold_31; pos 327704 to 329393 reverse strand)
tgcagaaagtacgtcattcatttccttttcccatttcgtatttacgattttttttcattcccccactttcagtatcctttcattttgttggattggtccgacatcataatcttttataattatcccaactatccagcagataaaatacattctaattttattgttcttggatatgctacatgtcttgcataactcgtgtctttgttgatataatgacttgaatcttcgatgatggacattaggttaaatatcacggcaatgtttggaaccgttttggatcttattttgatttcattttgaggaaatatgttttgggggaataatttgagaatgaaagtaatgtttgtttgtattttggaaggagacaaaatacactgtagaagtcaaatcatgtttaaaggtgttagaaaaagatatttttgaagaagaaaattgaaaggtgaagtgatgtttatttgtttttagtgaagacattttttactgtagtaatcaaatcattttactgtagcagtcacatcatgtctggaggagagagaaacttttgaaattgttttgagaaaatgatttgaaaagtgtaataaatctcattttgttttggggaaacagtgagaacaaaataaaaacggttccaaacattgcccacatatttaagtccatgatttgcccttttccattttataaagcttctgaatattgctgtttctatttctaaaaacatttgcttttatatcttttcattaagtgctttaactatctagaatcaatcactgaatgcattcatggatgggcccatgaggcggttagcttgtaatacggttgagcctattgactactaaatcttggataaaggtctgagtgacgattaatacaagtctaaaagaggcaaatagagatagaagttaaaaggcctccatgaattattatttttattgaaacgcggagacgctcaaaggagttaaaggcaagttcagttcaacatttatgacagaggaacacaaattgaattttgaacctcggtttagagggagggaggtaaaatgagcctcccgatctcaaggatctaagtttctcaagacatgaaaaagtacataatattttggccatatatatcatatctatcatgaaaggaccttctgttctttagttcttttagggtagaagtgctgggaaactgaaaatggagcctgattggtggagtgcgctggaacttactctatctcgttcagatatgcagaaatcgtgatgcctcatagttgatatagtctatgtagttgaagagttctgtatgcatttctctagtgagatctttttttattatccttgatgatgagtctaagtctctggctccattacacaagcagaccttaaagcaacattctcagatcttaattaagttattttgttttttgtgccacaaaattttgtttgtttctttatttttgtggatgagagagttggatttattgagggtatgagtgggaggttacccttattcgaggactgatgtttctatcatctattttacctgttaccatccaatgttttaatgaaagaacatttactgcagacttagttggtggatttgacaagggttttactgtagtgggcttagttcaattgcttatgatggatttttactgtaatgggtgtagtttaatttcttatcgggattgtggctttcaggaaaaag

SEQ ID NO: 13873 - DNA, 568 bp, Mimulus guttatus
  Intron number 11 from transcript mgv1a020020m (locus mgv1a 020020m.g) derived from phytozome v7.0 (chr-ID scaffold_85 ; pos 512022 to 512589 reverse strand)
ttgctgattgcattccagtcaatctccgttgtccggtaagtagttttagtgtttgcatacttggactattgattgtagttaaaaaaaaaactacgaagaaaataatgtgtaagtattcacttatctagtcgttatggtgctaataaagagaaaatagtgtacattctgtgatgttgcagcaatgctgctgatgagcctgtatcatttgtcagacacaagtaaatctcttaatgatatctttttattgcatgactgctgattaatgaatccactattttggcttgacaagaagagggagattggttttctgaatttttgttttaagataattttctgacccttgttaagtataacttgtatatgtggtctggtctaaccttaagcatgcattaacagatcacgacttcggccaagacgcatatgccgtttataatattatttttgagccttacaaagatttaccttcattgtgtttaattactaataattactttaaaatgattttcttgtatctgtattcacttttacttgcacataaatatcgaatatgtatttattcatgctgcag

SEQ ID NO: 13874 - DNA, 1373 bp, Mimulus guttatus
  Intron number 1 from transcript mgv11b012296m (locus mgv11 b012296m.g) derived from phytozome v7.0 (chr-ID scaffold_2 9; pos 1590242 to 1591614 reverse strand)
cttcagacaagtcctcactcaagccgttagcctcggttcgtactcaatatttttcttttgtgtagagagattctctttgtttttttttgcctgttgaatttctgattaatctcagctatgttttttttttttggttttactttggaaattcgaaagggtcttttgttttctgttttgagtagttttaagtgtggttttgatgattttatgttaattcttctgcggttacttctcgaatgtgcgaaagaatgaacgggtttacgaggatacgatggaggagacaaaatcggggagatgaattataagcatctttcaaatttttagattgatattctctacattttgtttcgattaaagatatggtaaatagcatctaatccccttgtggttcgactgcttcgtacatgaaccccttatggttgaatcatttttcatctatttgcaacgttgagtgaaacatatatttacacaatcgtcgaagagctccaaaaaatttagaattttcatatccaaaaatattagtttcattcatatcaacaaaaagtcgattactcagatttcagatttcaaatcacaatagcacaacgagacattgaacgcgcatgggcattcacaaaccttagtgtaaaaacaagtagctatacacaaacaagttcatcgagtatctagaaaaaatcatgaattaattgggaaggagatgttgaatctagtagaggttgtcctgccttgtgattcttcagtgtcaagctaattagcttcattatctattaagaaaaagattagtttatacttcggtaaaaatccattacttcatatttgggtgcgtaaattatgcgttcagttaactttaacgcgaaaatttcgacggacattatatattcaaaaccacataaggggttatgttcttaaagtacgaccgtaagggggttggatgctacttaaccttaaaaaatatgcaatattgtgtttttgaactgttttgtttgcttatatgttgtccatatcgtgtttttgaaccgtggcgttttgtttacacgcacacaaacacacatacattcttttagacgtattatatgtatatatctttttggtcaagttccctatataaactctctattacccctatggcattgaagacatacaatatttagtcttcgagggagggtttataattggttccctggataagttattcacacgaatcattattttataaaatggtcctcacaccagttcatttgatttcgtctatggatcttggatttgtggtacctttattctgtgtaaatttttttttttcgttttgtctctgggttttgcatcgaagaagtatatgacccaattaaccttattgtttctaatttatgccaggt

SEQ ID NO: 13875 - DNA, 1732 bp, Mimulus guttatus
  Intron number 2 from transcript mgv1a016880m (locus mgv1a0 16880m.g) derived from phytozome v7.0 (chr-ID scaffold_1; pos 3109849 to 3111580)
ataaagaggtaaagctgctgtaattatgttcccatcttttgaagtacaccggagtatgtatatataaatatacatatgctggttatgtgtgtgttgtgtgtgtgtgtgtgtgtgtgtgtgtgtgtgtgtgtttgggtatagatgtgtgtggtttgtgtcagttccacttccacatataaaaattgcaattgtcttaccaatttagatgttgtacaaatacaacgattaacatccgccacacgggttgattttaaggtgtctttgaattttgaaaatagaaacatgaataagatacctacagatcatatattatatgtgcctagtagcctatagatgttcgtgaatttgacagtaagatataagatatttgtcattgatgatgcaccgttgctaatgtgaatgcataagaaaagtacgacttcaatcttgccatcacaattccattgatccttttaaagcttggcttgtaagtcttcagttacagtaagaactgtatactcgggaaagaccaaaaatatgtaatgtctatttcaaacttagtttttctatgcaagtgaatctctggtagttgaatgtagtaagcatgtgttgatacatgtcactcatattacgtatagaaactcttagtttcatttcatcctctacctaaatcaaataatagaaactttttggtttggcttgccatttgtatgacaatgaaaagtgttatattggaccagacacagtcaaattcatctcaccaacaaacttgaagttcctatgacaggaattaccatgttttttttttgatcggcaatatccttgggatttaaaagtgggttctcagacgatgttttgcttcctcacagaaattattgaagtaaagttgcatatgcatttttgcattatccattttctaggagattctggctcattaagcctggacttcaatttcatttagtttaagtattcatgtcctcgaatagggcacttgcaatttcagtttgttggctttatatatatatataagatttcggtaagatgctttcggtgaatatgtaaattatccaacaatgtttgttatgcttcctcatcttggcatttcctttattctgcattctattaactggtagtagagattgttactgctttaccgagaatgctttcttactagtaaatttttgtaggtctttcctttcaagtttttgttctgagggacagtgtatactggctaagctcgtgattttcacttataggcacatgatcatttccactacttctttagccaattagcgtaaccatctggtattaggccatgttgattatgattttctggggtcactaatttattgtttttaataggtcttgggtgtgtcgtaggtttgccaaatcccttgatcatacagtatatagaagtatcatgtaaggtgaaaactcttccttcctcagtttactatcacggtcatcggtgaacctttctgcagcctactagcataacattgcatctctgtgttagaaaatttagcttgaaggtccttgagatgaacatatttgtgcgtgatcctgtaaaatgtttcaatagctacttaatgttgggagcatattgtctttcatgttttgccgaaatttgaagatgataacttactaagtcaatgtagtagaaactagaaagcttagttgggaactatcttcactacctgatggtttcttctttcttttcagtgtatcaaatttaagacagaccaagcacagg

SEQ ID NO: 13876 - DNA, 1390 bp, Mimulus guttatus
  Intron number 1 from transcript mgv1a000246m (locus mgv1a0 00246m.g) derived from phytozome v7.0 (chr-ID scaffold_246 ; pos 240161 to 241550)
tgaggtgacaaacgagaagttttggcatcatccaggtatctaatttttcaaagtcgtactagttgtcagaattggaaggggatcattttggtgttaacttttaatattgccactccccttaagctttctagtgcaattgtacagtttggtttaggtgcatcatactctttcttgagcattctatgctatacttgatgctttagttcaaaagtgtggaataagtatgattgtgttttccttgttgtggcagtcagaaattttagggttacctttgaattggtattaagtgtacgttatttgcttatattggtgcatattctgttgtcttcttcctattagattgtttacgcactggaagtgcgaccgttttttgagtactggtatcgtaaaaccgtaggattttacgtatcttttacacttattaagcatgtggaatttaaattttatgtgtcaacatgtatacaacatctcctaacatgaataaattatgtcccaacataaacaatatatgtgattttggtagaccaatcctatcagcaaagacaatcttttctatggtgatattggcgagcttgtcttgccattggttctgttcacaaaatacatgccggacagtgcctacttctgctatagccaaagaacattttcttgccaaataagtgtgttctcaatttgccatataaatgaatgcaagatcaatttatatgctaagacggagtccgataaaatataacttcaggaatagggtacgaatatctctactagtacaaatataactccgccttagtacaaatataataggtttgagaaacccgcaatgaaatctcctcgattatctctaataagtgataacacctatacattttatatcttcctgttgatgattttatatccttggtaatagtgaggttcactagaatttgcattcattccagtatgtgcctttatcagtaaatattgcgtatgatctgaattcgattcatttgaatatcctcaaagaccggcacatattgctttgacttttttattcggtttgcatactgggtgtttgagtgctgctattgctaattgttccttagtgactctcagccctagttttgacatatctactactgtacattccaagctcatcattagtttattatccagttatgtggaatggattcaagacctaactgcagctagtgttttgcagagttttctggcgttttgtccttaagatttttccttcattccttgtgtcttacttattttatttcagcagcttttagttatgactgtttcttttgttatggataactattggtcgtgatttgtttcatatatgtttatttctttatttctgaaaaaaacagaggaagaggagctccagcgcgttcctggtcaattt

SEQ ID NO: 13877 - DNA, 1156 bp, Mimulus guttatus
  Intron number 6 from transcript mgv1a003202m (locus mgv1a0 03202m.g) derived from phytozome v7.0 (chr-ID scaffold_11; pos 1617884 to 1619039 reverse strand)
ggcaagctcgagcagccttgggagaatctgctaaggtgtttatttatttatgtttcctgccatatgttaattatttattttgtttgagtttattttggttggttttctgctgcattgcgatttagtctagtttttagtgcaataggggttcttaaattttttgaagttcgtctattctgcaaaagtttttattttcccttaagagttgtatatatcctcaatatattacaagatcaactaaccctcaggtacctgtctacctcgaacagcccctcagaacaatcttaagagatcacaatgtacggatgaataactactaatcagatttaatttcccagagaacccctaattgtaaatcaaaaatcaaaccacaacctcaattaaaaatttcagccatttattgatcaaatttaccatggctctcctgtggaaactcaggagttgtactcagggttttcccctgtcattttctgaagtaatccgagctggaaaatcaacagattttatacctactttattcagaagagtgacttatatgcagcataaatttgggaaattcagtataagtagtctttttacatgcaacattcacatgttctctttctaaaatggtcttttcatgtgcatcacatgtggctgttgcaaacatggtctttgatctaccaagtcattctcacaatagtttgctgcacttaaatatgagttgaacatagattcgatttacttgctttttaggagaacaaatttcacttttcagaattaacttgattagatactttttatgttgttatccttggtggtttaagcggaggtggaaggaaatagttggcaatatactgagtaggtaatgagtggctatttacatagtcagtgcagtggatgtagtaagtgaaagaggagtgggaaggagatggaaatgagggtagtgagtgactggatcagacagaagagcaggagcaaatgatggaagaacctaccacttggcaaatttgttactgtaatttactattatatggtgtagcattctcatttcgtctgtagtttcctaggtctacaggttccccataaattggtgcatgtatagatttatatacaatttatgtctaattagattcttgtttccactttccaggcaattgctgacttgacaaaagca

SEQ ID NO: 13878 - DNA, 1057 bp, Mimulus guttatus
  Intron number 1 from transcript mgv1a006922m (locus mgv1a0 06922m.g) derived from phytozome v7.0 (chr-ID scaffold_190 ; pos 380935 to 381991 reverse strand)
aaaatcaccccgataaaggtggagatccggaaaaggtaaaaacaaaaaaaaaaaaaaaaaatcttagtcaacttgttcttggtactatttttatttgtgttctgtagtttaatttattttcgatttatgctttttatgttcaagatcggtattttttaattgctgcgttgttgttgatttcttttgctgaattgattagggcaaaattcaatgtttttggtttcgataataatagctatgatattcgtctttcgatgcttttcctatttcttcacaaacaaattagagattcgaaagtagcacacaatttcaaggtaaattacgactacccggttaaattacgaaaaaaaatccctcatgtttgggtaattacaatcacccctcaactatgaatcttcttacacggtcacacttgtggtgtcaaatttagcggaatcttttagattatgtcgaatattcttcggtttgtacccgtattaccccgtttgagcttgcacgatgatcgtaaaattcgtgtctcttggcttgtaaatattaaattgtgatgcattagaaactgcgtttttgcacaaaacgagtacaaactagaaaacattcgaaatcgaaaaaattatgttaaatttgacatcataaagatggacgtgtaagaagaatcgtagttttgggttggttctaattatccaaataggtggggttttttcgtaatttaaccttacctcaggggctgcctgtaatttacccaaaagtttaatgttctgatgttttttaaagtagaagtgactagaagacatattcgtgcgagtcttctttgttctcttatgggaaattgcaactttcaaattgggatccttcagtcgttgtataaatttatttatttattaaaacatagagtaacttcctaattttaatgatcccgagtatttggggtgcaagttgatgcgaaaaagacaagagtcttgctacttgcagaggttgtgaactcgttaactaacggctgttcataatactaaaagagcttgtttccgagtgttgcagtttaaagagattgcgcaagcgt

SEQ ID NO: 13879 - DNA, 1350 bp, Mimulus guttatus
  Intron number 1 from transcript mgv1a001944m (locus mgv1a0 01944m.g) derived from phytozome v7.0 (chr-ID scaffold_27; pos 783823 to 785172)
agacgagtgataaaaagaagaaccctcacgacaaggtaattttcattgtgtatatgtttatggtgagaaactggttttcttgattgaaatagaacaagttttagtagatctaatggttaacttaaatcgggacccattagtggtttcttgaggcatttaatcaggtgaatggtagtaattatttgcttgggtggaatgctcaaaaaatgtaagagttttaaatagcaactgggaagtgaaaaatggtaaatcctgttgtgatacagatttgggaattattgattttggaagcattagttaatactggcaatcaggaattattatctgttatacatgacataatgttgagatagattaaatccaaagttgtaactaatttgatgtttgaattacaagaattcaagagagagatagagagaatttgacctacatcagtggataaaatgccaaagaattgaaatcactaatttgttgcctcggattttacataagcaaatattgaatacgagtaccttaccttgaagttaataatgtcattcgtgtaattagactaaatgaattaatctattgatttaatgtatggagttggatttgatgagtgacagtatagttaaacctttcaatttctctctgaatagtacagccgaattaacctgctatggaactgtaaaaatatatgcttggatgtatttgttacttggcgacattagcatctgtaagtcgagatcggttcatctaaaattgcgttgtcctcactggcctggaatgtgggcccactgcccaacatatgattaataaaggaattaactgtttctttttgtggtctgtcctttgtcattttcttcgattttgacttgagtgagtgactatcttatatatgtttgtgcaaaacataatttttttctttatggacctagcgtaattgcgttttcatattcttttgtaattgaactggtttctatttgatgaaaagataaaaacccttaactgattaaactagtgattttctgtcttcagttttatgccaaagatttggaatgaaagttgtaggttcttatgtttatctcaacttctgataatttttcaaaatcagaattaaaaaattttatgcagctatattaataatttatgtctaagttcccactataattctgtagtgctaattgccattattctttctagacttgtttaaacaattaagctttagatacattttcttttccttatctaaagctttgaagattatgtccgacagacatttgtgtggatgtgaacttctctcgattgatattccaaatttgctccttttgatcaggaatataggtccgaccagagaggacagtggataat

SEQ ID NO: 13880 - DNA, 1681 bp, Mimulus guttatus
  Intron number 1 from transcript mgv1a019021m (locus mgv1a0 19021m.g) derived from phytozome v7.0 (chr-ID scaffold_37; pos 304762 to 306442 reverse strand)
ggcttagtgactgcatctggaactgtttacagggggttagttcacattgcaagattttatttatttatcttcattatattatttggcctccttcagttagaaattggatggactgaatcgaaattagcaaattacattccatgttttttctctaattgtgttccaacaaagttcgaaagaaaaaatggaaatcaaaatttcaaaaaattggaatgaaaatacttgttccaaaatatataacttgtgactggaatcggtagaattcgaaaattccaattttccaatcacctataatatgctttaggataaaccgaatattgatattatataggctaaatggcgcttaacctccttgtggtttgaactttttgcacatgacccccttatggtatgaaattaggcacataacacacttgactagataactggaaaagactaaattacccctaaagaataaagactttatttcttaaaaaattaaaattcgataacaactataatataatatattatataacaaatagtaaataataatcataataataataatattaaagcttagaaatatatagaattattttatcgaattataattgaacaaagaaattgacagttcataattttatatcgagtttaatccttttacatttgatttgtagcatatgagattttcaaattggtttctaaaattgaataaattgtcaatcgtacaataactagtattatataccttttgtgttgtaaaattaaaaaaacacaataatatattatatttctcattttacaaaaaaatacattaagcttttaattttatagaatagttatttttaaattaaaacaagaaaatttgacttgatggagtaaccaacgaacagttgttatggatgcaatttgggaaaaaaatatgggtaatttagtcttttccatgttttttatttagggagttatgtgcctaattcatactatgagggggtcatgtgtaaaatgtcaaaaccacaagaaggttatgtgcctaattacataccataagtagttcatgtgcaaaatgtccaaaccacaaggggatatgtgcctaatttcataccataagagggtcatgtgcaaaatgtccaaaccacaaggggttatgtgctattaccctattatatatgcacttttctggttttttttttcttttaatttttgaaaacaaatattaaactgggatcggaaatcactatctaattatatgtagggtaaattaagtaaatctccctgaacttaggctaaataacaaaaaacaccccacctatctataataaccaaaactcccttctctttaactgttgatagagtttgttgatagagttttttaacaaaaaatatgtagagtctattatacattccgttaactaggtgaaaattaaaaaaatctgaaattctgtaaagtctaatccgtgaaataaaaaaaaatccgtgaaaaatcacactaaagaggttggtgtaagacggaaacaaatctcgcgggatttttggtaattacgaatagatgaggtatttttcgttagttaacctaatttcgggtttttttttttttttttgtgatttaccctttatatgtattacaaatagattaatccgacatttgaattttctgttatttgtaggggattctacgtgggagtatcttccctagaagaat

SEQ ID NO: 13881 - DNA, 679 bp, Mimulus guttatus
  Intron number 2 from transcript mgv1a023655m (locus mgv1a0 23655m.g) derived from phytozome v7.0 (chr-ID scaffold_444 ; pos 1934 to 2612)
gctcatcaccactgcttccctcgatcacgattctggtatgtatgcgcgtgcgtgtcttcgcttattattggctgaaagttcattagtcaaaatcccgattagaatcccgaaatcctatgattttacgattttactaccatctacattcaaatcttttagtctatttttttccctaatttttcatctaaatcacttgaccttgtgtttgacctaggtcactgaacaaaaaatttgatttacttcatggttacacccacccttttacctattattatagaagaaagcaaacagagccttaaaatctacgattaatcaaccaccaaaaacacatgttctgtttatattgtgcatactttatttatgtcacgaaaatacgaaatgtttcatatatgttaagagatacagaatatggcatgctatataaattacaagaaatgtaaaatcctacaattttacgattacgattttacagccccttttttgattcaacttaaaatcctgatcaaaggacatctcaaccgttggattagtacggtctcgtgtatcgaaactgatgattcaacggctaagatatcatgattaccattttatacccaaatcaataataatacaagataataatagactccagtttgtttttgcagaagaaaatttgaagggaaaacccgggaagatagcg

SEQ ID NO: 13882 - DNA, 1631 bp, Mimulus guttatus
  Intron number 1 from transcript mgv1a004781m (locus mgv1a0 04781m.g) derived from phytozome v7.0 (chr-ID scaffold_497 ; pos 21153 to 22783)
ggtaattttctttatcttttttttcttttttttttttttttaaactctacttgctactttttatttttcttacatatctagaattttggttgattttctttgctcaatataattcacttgtcttaacatgtgactatctgacagtactgtatatttgtcgtacgtgtaattagtttttatactttttaacttggttaatattcataattagctttgtgattattttttgttattaaaataaattaattaaataaaaaaaaaaaaaacgagaagagatgtatgcattcattttgttcgtcaaagtaaagaaagttagctttgagctttctattttgcaatttttttccttgtgcctttttgactatctggttgccttcattcttaaatatccagctggaattactttttattttggggttatttttctattttaacttgtcggtgaaatttgtattatttttttctaatttttaatacaatattacttttttctttttcttttttttatttcttcaacatttttgtcaatatttcctatgtttttttgttgtctttatgctggaccagttctactattacctttctaggtgattaggttaagaaaggtcattatagtaattttccatgtccactaccaaccaattatttgaaaatttctctctgcattggaatacatgtcagcataggatgcctctttattcaaatccatacattgacgtaaagttaaacttctataaatcaatatagatggactaataaaattttattaatttaataaaatactaaattatagaactacaaatttcctttacgtcaagtcggaccagaataaattattattatttaaataaaattattaatttattgagtaatagtttttcgaggttctactgtattttaaagttgttttgaattgttacttcctctcaaagtaacagtccgtttaaatgatttttgttattatatgctaatctcaaattttatgcatttattactcttttttagttttactcgaattacacataaattatttcaatataaattatttataaaaattgctcctctaaatttactattttatatgccatattgtactttaatcattacttgattaaaactaatggcatcattccccacacattactccaatagggggatttattctttttaatttttcctatactaattgataaataaaataagccccggcaaccaagaaatcagactgggataattgttaaatatgtgacaaaacatggtggaagatcatctaaacaagatatttggtggactacaccatttcattctttcataacattatttttattcaatcaaataatctttatagtggcaacatatcaaatcacttgcatatcatgaccaaaaaccggtcaaatctgccaataatgtatttaatatttagatcttgaactttgttactgtatttttgtatttttacatgaagttagatgttacacctgattatttatattgggtggatttgaaccgtagttcttgaactttgttactgcataagcaatttcaatcaagactttctaattaaactttctaattttttttttttttttcttgcagaactttcatagagacctcccaccgacgcaagtgtt

SEQ ID NO: 13883 - DNA, 2277 bp, Mimulus guttatus
  Intron number 2 from transcript mgv1a011259m (locus mgv1a0 11259m.g) derived from phytozome v7.0 (chr-ID scaffold_83; pos 710595 to 712871 reverse strand)
atcgtaaaggtttgtgacttttcttattctcgattttgattggtaactgttttgattgcatttctatttttttttttctgatcagattttgtctctgtgtatgtaaaacggttgcgtaagtggtatctaaatctaaaatgttaacgcattgatgaactatgtatctgatgacttaccaatacttgcgatttttcagaactgtgggatctgtgagggatcacttagtaattagcattctttatgccgaatttgtacgtgttgaatgaaacggagggttgggggaaggtctttaggggagttgactttgttgcgacatgtactgcggaagatttatgtgctttattgcactttatcctgctagtattaacacctagtccaaaaatctaaaattgccagccatccgtctttatttgtttgttaggtttgcttgcttgaattagtaacctgaatcttacatttattgcacctgatatacgtcttttggtctagttcttgttgttccacgtggatgtgacgtgatcggaagtaaaaaaacgtgtccatttcatgtttagatattttaatgtttggtaataattgttaagattttctcgctaacggactcgtattgcgaatgattacacttcattaaaagcgcagattatagttttttttttccaaattttataagatcatatgcccaaaaaaatggatctaattccggtttctcaacatactgcccgctaagattttgcgtatctatcagtttcctagaatgttgtaattccacatctaacatgtacctaatgttgtttctacttgttatattagtgttaatattattctcttttcgctaattacttcattttgaaattcgttacttttaattattgacctcatcgctttgtgagtgacacatttccatctaatgcaccctgatttttctaacaaacatgttttgaaacttagtaagccctcaagatcaaatttgtcttgctcatccacttcatcattgtgtgcaaataaaaatgttgataaaattactcatgcttttaactaatgctttgaagaaacataatcttaagatccttccacgaacttgtgggggaagctcccaacaagagcttatgtatgtcaattttacttttgttctaatgccgtattgtagaaaatgttatcatcaattattacgtttgttggatgatttgattgtatatgaaaatatgaaggtttatgcataaaaatattccgtaaccataagtgaacatgcggaagtacagtatcggaactgttatggaaaaccatgaagatatggtaaatgattcgattataaaggaaagatgaatcattaaagttccgataagtggtcatgctgaaatataccatgataattgttatagaagaccacaatagatgtattttagtagtgttttacttgcttagagttgggttattcttcaaagttgcatcaagctctggccacagtggcatgtgctatgtgttttcgtactagtcaatagacttgctgagaaaagtaaaaagtagtttccttcccttaatgctctagtaagcagccacaaacgggtcttcttgatacacaaattctaacatcataacctaaattttctcaaaatttccaagctctattgcatacatttatctgcatgtgtatgtgtactgcttacatctatcagatatgtttgttgatgaaagatctgatgagcacagaaaaatgcattatgttcttttactggttcagttgcattaagggatgctgtatatccttttcaataaatggttctgtatctttctttaggctggcgtcgtgcgtttccgtgatgacataactacatattcaatttttcattatacaggagtgaagtttttgttagagttgtttcgatgacataaatagaacctttgaactgaagtgacaaataaatgactttgctattcctttaggtttctttaagttggttgcgttagacttatggatctcttctattgctatttcttttaattcatattaggttcgtttttttatttatgttttctttcacatgtttgcctaccaggctaccattatgaaccacaatttttttcacatgggttggctacactacgatgctgaataattctaaatgagaaatatgcacgtggctgtttgaataactagatttttctatacgctactacatttttgatgcatttatgagtttggtcaaagtaaacacgtgttgttttgctgtcactgaaatatttcatgttcaaacagattcctagccaatacccggcgtg

SEQ ID NO: 13884 - DNA, 920 bp, Mimulus guttatus
  Intron number 1 from transcript mgv1a004174m (locus mgv1a0 04174m.g) derived from phytozome v7.0 (chr-ID scaffold_36; pos 633400 to 634319)
ttccggctcaacccatcaccggcgccagtcagcaggtgtgtgtgtgtgttggtttttgaattattttaggaaagttctgtagatacttcgatttcaacttggaacatttttgactgtatatctgacaattttgaggttgtatataatttcatatgttgtttaatccactaattaacattcgattatgataattggaagtggttctggttccttaatgtatatgttttgctcagtttgtgccctctatttttattattagatgataataattgtgtttgcagttgatgcttaatatgtatctttgtttcatgattaaggaataaaagagtgtatatgtaagtatgttatgtaattatagtgtggactctagtttttgctattcagtatcatgtgtttttatatatgcttcttttataggtagttgtatacaggatttggtgtgcttgctttgattagtttagaatcagttttctggctcataattcttttgttaatatattttaatccactaatgaacactcaattatgataattggaagtggttctggttcgttaatgtatgtgaaagtgtatatgatgcctaatatacactgtggttgcagttggtgcctaatatgtatcttgtttaagggatttctgtgtttcactcgttgatataatgttaggatattgtgtactcgtagtttctggtacttaggtaacctttgtttgcatctgtgattcttttatccatatttgtatatttggtttgacacttgcttgaatagtttataatcaattcaatggctcttaatttttaccacttaggcagacgtgaatggtagttattttattcttcgagtctttatctcatgaatttttggttaaatatattgactcttgtaggtggagattcaagtgaggaaactttattgtgtgaa

SEQ ID NO: 13885 - DNA, 417 bp, Mimulus guttatus
  Intron number 1 from transcript mgv1a025138m (locus mgv1a0 25138m.g) derived from phytozome v7.0 (chr-ID scaffold_159 ; pos 84093 to 84509)
gaatagctcacctgctggattgctctctcaaagtatttttttttattgttattttatttaaaaaaaaatcaatttatttgtagtgattaatttgccatcttttttttttctcaattcagtatgtaattaataaattttggtgccctttttagtatgtgtctaattgaattttgtagtgattcttagtttttggatatttaatttaatttaattatattagtttgctagattttgttcttcccctattttatttctaaaggaatatcaatatttaaaaaaaaaaaaaaaatcaagaaactctctttttgtttatcttgatttttgaaactttgcgatttcgaaatgtatttatttcttacaataaatgatcggcgaattacaggctacgccggggtaagaaatcacacgaacttccca

SEQ ID NO: 13886 - DNA, 1313 bp, Mimulus guttatus
  Intron number 1 from transcript mgv1a009181m (locus mgv1a0 09181m.g) derived from phytozome v7.0 (chr-ID scaffold_52; pos 1313095 to 1314407 reverse strand)
atcaaattctctctcttcaccttctcttgcaggttcactttccttcctatatacataatattcttcaaatctatatttatatataaaatatataatttgtcctctcaaaagccagatccactatcaaacgaaattgttgaatagatagttggtatttttcactttacaccttttgggctgttttgcaatttttaaaaagttagaaacatatttgaataacaaatttataaatacttttgttgatttaatgagtatttgcaaattgatagtttgataataatatttattttaaataaaactgtatttgaactcgtatccccgtttttctgacatgtcgttttccgtgtctgtttcctcatttctctccatcgccgttttcgtgtccgtgctacacagctaatattgatatttgtatgtgttcttaaacgattcaattagtatagtgtgttgcattatttatttgcttaatttttctagcaaaatatattttgtggcttagaaaataaattcttttggatggaagaatttgactgaaggatttcgaatctataataacaactcgattgattttctttttctgggggttgagtcatttgacaatgtattttcaatccataacctctcgttttcggttgtgtggaggatttcaaatctctttttcctattctgagtcatttcaaatccttcttacttcaacatatttcaaatcccttggtccaaacgcaaccttagtttccttctagaaaataaaccgaaagacaaaaacctatcaaattaaactacacaaactcgataacgagcccaaatccagttcgaaagtaatgagattgagtgcaatttccgtactcaacgacaacttgaaatatagaggtgaaaccatttatattaaacctagaaggtaaaaaaaaaacttacaggattttctctccacaaaactatgtcctctattttttcaatattttatagggcaaattacgaccatccctgagataagattaaattacgaaaaaacctttcttgtttaggtaattacaatcacccctcaactacatatgttcttacaaaaaccccctccttcagtaggtaaatttgacaccgtaagggcggacgtgtaacacaatacatagttgggggcaattgtaattacccaaacatgagagggttttcgtaatttggcctcaccttagggggttggccgtaatttgccctattttataatgcaacatataatactagactgcatcattttgtaatgaggtatcatattagtaacacacaaaatgttttggacaaaccagaaagaaagagagcag

SEQ ID NO: 13887 - DNA, 667 bp, Mimulus guttatus
  Intron number 9 from transcript mgv1a024704m (locus mgv1a0 24704m.g) derived from phytozome v7.0 (chr-ID scaffold_63; pos 784315 to 784981 reverse strand)
tatctgcagtattacgtcctctaaaggtacaactatgtctttagctccacaatctttaaatactaatctataaacaaatgacacgacacaggcttatagaaatttatggttctttcatttgaaactgaaatttgtaggatcaacctctgcaaacaaatacagtagaacctcgataaattgaataacctttcttaaataataatttctcccggtcccgattcggtgacaatgtgttaaaatattaattcgataatttaatattccgctaaattaatacgattttgccagtcccagctgtattaatttatagagtatagtgatatagtgattctgccaaaattattattaatctttgcgaaaagaaaaagttgaagcgaatttactaatgttattcgcaatcaagaattagtaatacttactaatctctctctctatcctcatcacccaacacaaacataacaacgcaactaatcttgtcgtatggggtactttaaattgatatctctgaatacatgttaactttcgattttcgactatttttaagtctacattatttctccaaccatatattagtaaccacgaacgtcaaactgatttgggagaaaatcttccatcactgctatttcctgcaggcttttctggaagcagagcaagcggctacgtattt

SEQ ID NO: 13888 - DNA, 2880 bp, Mimulus guttatus
  Intron number 1 from transcript mgv1a024560m (locus mgv1a0 24560m.g) derived from phytozome v7.0 (chr-ID scaffold_69; pos 793510 to 796389 reverse strand)
gtgacaagagtgatcaaggtaggaagttaacctaactttcagacaaccttaaacaacattaaatacatatataatactatctattttcttgaatttatatattgtttttgtttattaggtatatcatttattaaagatatatgccgtaaactctggcagaggcagctgttcaagtggatgcaccaccttcccaggatgaagaagaagagaaaagtgatgacagctgggaagtgctccttgcctccttccgcaaaaaattgccatcctcagagtcagacagtgactcttctgaggactcatctcagatggaacaagatgctgctctacctgttgcatcacctgagccagcatacatcccagatgaacttgaagactcagaagaagaggaaccctcaaaggaagaagagcttgacttggatgggaaggatctgtcaactccttttgaggtaaacaatgccttcagtcctaccttttattttgaatctgattcaaacatgagtcctcaaatcatgaatttccaattcattgaggaaaagaaaatttccaaggatgagtttgataggcatataatcactgcttttcttgatcaaagaaaaatccttagtctagttgaggttgcctgtccttatgatccctctgttgtgaaggaattttatgccaatttacaaacctcatttttaaagaaaaattctccaaacattggaaatttttttgtgcgaaattctattttctcattttctcccaaaattatcaactctcacttacaaactcctactatgattgatgaggataattatggtgattttactgaggtttgtcagactctttctgacaatcgtctaaacacttgacctgctcacctcagaaaattcaaaatttcttaacttactgcattttactctgtcatgttcagactcacagtgatgaattggattccatcaaaaaatgtctctgtgattattaaacctcatgcagtactcatgtacaaattggggatggggttacctgttgattttggcaaacttttcttcaacaatataggtcatcttgtccagaaaatttctttctccactcatcttccctatccttctctcatctgctccattctactttctcaaaatttgggccaagatgaatcagaatatcttcacactccacttggcatgataactgtttctcaaaattttctcaaagctcctcatgtccaagatcttccgtggaatggagataattttctcccaactgaatcaggtcaaaataatcttggaatcttggtactgaaggtgttgctcctcatgctgacaacacccctgacatccttgtttctgttcctcgagatcttttgttacaacagcttactgactccttagctcagatcacttatcaccagtccatggtggaaatgctccaaaaagctctttatgataaaaaagggggagaacaagctagtcatgaagttgaagcagggacttctcatcctttggatgcaagaggcagagagcatggagttaatgaagaagaagaaaagaatgagggtgaagctgaacgagcagaggaaagcagtgggtccagtgctagtgatggaggaatagtagctgatactgaggagaccttggatattctactttaattgtttttttataaacaatatttatttttgttctgtttttattttttccctctgaactttttaggattgcacttttgttgattttttttttttttttttgtgaattgtgttggactatctttgctgaatttgtttttgaattgatctttcaatatttttttgctatggttgttatcaaattcagggggagttcaaacaatgtctcagggggagttaaactaaaatttagttttgatcagaaagttaaaaatgtggagtttgaaacacgtggatttccacagagtgtttttaactctcttactttcaaactaaattttagttatgactcagtgggctaagtataatacttagtgggctaagtagtgcttagtgggttaaattgtggatattattttaactactaaactcacccactaacccatgttcttgagtgttcttgtagttggttttcttgcagatcatgggctgagaagtggaagcttggaatgtctataaataccaaactcaagactcaagaaagtttaaggattcgaagaaacaaaaaccgagagctgcaaattattcatgagagttttagtgtgtatctagaatctgttgtacgtactcctcacgagtacattctttgaaatctagaatttttaatatttatctttttgtttctagatttgattgtgagaatgatcaagctagtgattcattcataaggaagaagtttttgtacttcttctctttgtattcttgtaatactgttttaatataatttttacgtcatttaaagggcaagttcacaagttttacttgtgaacatttttaacatcagagtattgcttttatatttccgctgcatgtttatacaagtgtcataacacttaatataacatgtctgtattaaatgaattcaggaccataaattctttcagtcgtaattacccaaacatgagggagatttttgtaatttatacgagattttcaaggacggaatattcctcaatttccgtgaagtattgaatggatttcaaataatcaactctccgacgatcggttgcttattaatacactagcatgtgtagttgcattgagatactagaatgttcatggtgacaagagtgatcaaggtagtaagttaacctaactttcagacaaccttaaacagcattaaatacatatataatactatctattttcttgaatttatatattgtttttgtttattagggatatcatttattaaagagaatataagtaagctt

SEQ ID NO: 13889 - DNA, 1892 bp, Mimulus guttatus
  Intron number 3 from transcript mgv1a002915m (locus mgv1a0 02915m.g) derived from phytozome v7.0 (chr-ID scaffold_116 5; pos 1549 to 3440 reverse strand)
aggtaatatatatatatatatatatatatatatatatatatatagagagagagagagagagagagagagagagagagagagagagagagagagagagagagagagagagagagagagagagagagagagagagagagagagagagagagagagagagagagagagagagagagatattaactttcgtacttagtttgagggtaaacagtataaaagcgccatttgttaaggaaaatctgaaccagaacgggcaaaactatttattttatgttattgcgtagaacccctatgttttatttatcttgcatgaaatctcctatttcgttaatagataacactgataactattgaggggatttcatacaattttttcgtaacacatgggagtttggtagatgttatttacaatacaagtggaattttgtgcaaaaaaatattcatttacttaatatttgaaaaaaaaatcgaattaagtttaaacatatttattcaatctttcaaagttgaattttcgaaattattaatagaaatctttatatgaaaactaaatttaaattttcatattatttgtaatcttttgacatataatacacccatactaaattatctaaatatataacactttcgatattataaatatataattttgaaaaaaatattatttttaaatatattaataaattaatttttttttttcaaaactgaaaatttccaaaattgtatttagtttcaactttgatgcaaaaaattttaataaaaaaaaatcgaataatttttttaaatccaaatcatcatcatggaaaaatgagaaaacaatgttctaacatttaaacagtttaattggaaatggcaaaaaaaaaattgttagagatttcatctttatcattattttttaatttcacatattgtaatgcactatgtgtttggcttgatttaaaaaaaaattgatgcagaaagtttaaaaaaaaaagccaataaaattttaaaaatccaaatgataatcataaaaaaatgttctaagatttaaacattttaattggaaatggcaaaattaaaaaaaaaatgttagagattttatctttatcattatttttttaatttttcatattgcaatggactatgtgtttgacttgatttaaaaaaatgatttgaattttaaataaatagaataattttgcataaattcccttagatattgaagaaaacatacatcaacccctcttctgttgctaaaacattgcatgaaaatttctaagtagttaccggtgttattgtttaacggaatagaaaatttcatgcaagatacaataaaaaacataggggttttacactaataaaattaacacatggtattcggtgcatattttgagtaacacaaaggggttttatgcagtttaccccttagtttgaggatgaaaaaaattgcttcatgaactctaccagaaaataaaattaacgcatggtatccggtgcatatttcaataacgcaaaggggttttatgcagtttaccccttagtttgaggataaaaaaaaattgcttcatgaactctaccagaaaataaaattaacgcatggtattcggtgcatatttcaataacgcaaaggggttttatgcagtttaccccttagtttgagaataaaaaaaattgcttcatgaactctactaaaaattaatgtcttgagtgacaacacatattttcacatgattaggtaaaacatattgtcactatacttgtcacttggatgtcaagtgatagtaaaaaaatattaagtgagaacaaatagagttgtgacaaaacaaatattagcatttaatatatgtatttaatgacattttttttcttgtagtggaagttttcatattattcgtgtgtataggtggtggaaggag

SEQ ID NO: 13890 - DNA, 574 bp, Mimulus guttatus
  Intron number 1 from transcript mgv1a014148m (locus mgv1a0 14148m.g) derived from phytozome v7.0 (chr-ID scaffold_4; pos 576247 to 576820 reverse strand)
ggctccgtttttggctacggtaatcatatgctttttttgattccctcctgataattaattagttattgcttccttcatttggtattttgtttggtttgaaataatgcaatttcactgtgtaattaggcgcctaattgtaggtttcagtaattctggaggctaattttttatcttgtttgaatttgtcggtgatttcttaatgttgtgttaaatattagttttttttttctttctcagaatgcatttatatttagttggtgcttgtttggatttgttcaactagagttaattataacaacatctgtttaaagaagcagctgggattgtggtcaaatcaatcatccgctttcaagtaaaatagaaaattaccgaactccgtcggttgattttcttgtattggattgtattgccgactcgtgtaatgatcgtcatgcttagagttacgtgaacttatgactcgtgtaatgattctcgtgtcgtagtttcggaataagatttatcgaagcttaccgttgggattcttcgtctttgtgtattaggttctggattaatccagaggaagggctttaaagga

SEQ ID NO: 13891 - DNA, 1233 bp, Mimulus guttatus
  Intron number 2 from transcript mgv1a014895m (locus mgv1a0 14886m.g) derived from phytozome v7.0 (chr-ID scaffold_140 ; pos 661831 to 663063)
ggctacagtgagtatccctcattattctcattttcaccatttctaatttcttgattttgtttccaattagcgtttgaagtaagatgactgtttatttgatttgtttaatggtgtattactttggtagcatacttttgctcgagagtttgcgttttcttgtaaatctttttttccccttgttatctaccaccaattgtttatttgacagaatatttaatttcactacgatggcgatgtgttcaaatattgttaatggtaacaaaatcaatttaagaacgatgattgatttgattcgcgagaaaaagaaaaagaaaaaaaaaaggtgtaacaaaagaatttttcgtcagggggataagtaagtaaataagatatgaaataaataaagatatcaatatcgaagcaacctaatatgtagtgaagatgaaccaatttaatatcatctcatgaatgtcaaaataagcatgctaaacgatcaattaaactgcacttggcgattttttgttttgtgtagagtagaattctatcaaaatattaggtcgatttctatcataatcaagtctaagcatgcaaatcgtttaatcagtttctgcacattttttttctttctattccatgttgggtcgatacgagcttgagatgttctactagaatcatgttattggtacactaatggaatcaagattctatctaggcatattaaaagattcttcagtgaaggattggagcaaatttgatcttctatgtatatagtttctaaatgcgatgttgctgtggaactctgactgtttgctgctatttattgtggagcatagttttcttataaccgtgcagttgggtaaagtttggaggtcagtatgctaaagggggagagcggtaagttagtaattggaattagttcgactagaattttccttagaatgtatcttaaatttgtttcacacaaattgttatgagcacttgacaactatcacacatcctgtaaatataaattgaaatgaaaggacagaggaatggttgtttatttatcatacctacgtgcagtagctggtatttattagttgtctattcgattgcaaaagctgcaagaaatgtgaatggataccaagcctgttattatccatgtcatcagtaaaggcaatctacaaactaatatataaacgaagagtttgatgatatttatggatgatattttggttctttaacatgtgaatatgtttgtacgtgtttacagta

SEQ ID NO: 13892 - DNA, 623 bp, Mimulus guttatus
  Intron number 1 from transcript mgv1a010789m (locus mgv1a0 10789m.g) derived from phytozome v7.0 (chr-ID scaffold_104 ; pos 882608 to 883230)
gggaagaaacggccaagagaggcgtcttcgaccaggtttgaatttgttttttaatttttttaatttttcttaatggaattcaacgtcattctctatattaggctcctgagataaattaccatgttttcttctagtctataaatggcgattatgttgataaggattggtaattttgattttttctactgtggaaataatgactttgggaggcgatctaggtaggatttaggaatatgagttgactagcatttgataattttttaaccattttttttaattgtatttcatcacagttccatcagatcgttgaaagttaaaactagatccaacactccttacatatgactgtggataatttattctgtaatattttgattgacaattcatgcttgcagaactgattctgttgtttttaagggaatagtgcactgatctttgtagcttttgcttaataagtttccaagtttttccatcattagctgctgtggagattttaaagtttacttatataagtagcctttttcgaactttttgtgtattgtttcccatgtatttcctcttattttttattttatttttcgtatttagaaactaaataggaagattgtacacgttacggttgg

SEQ ID NO: 13893 - DNA, 2190 bp, Mimulus guttatus
  Intron number 1 from transcript mgv1a008567m (locus mgv1a0 08567m.g) derived from phytozome v7.0 (chr-ID scaffold_104 ; pos 622375 to 624564)
ggcgttcgattatctccatcgacggcagcctgaatgtaagctgtttaaacccacacacacacacacacacacaaacacacctaggttgtatcagttggagtgtgtatcctacattaggttttggtaggtttggtgggaattaagatctgtgttcgaattcgtttgattacgtgtattgtacgagtccaatttgtttttttcttttaatttatccttacttttgattttgggtacttcaatttcttaattgtttacaccaactctgcatacaaaaaaaatgtcaaaaaaatgggatctttgtcaacgttcgattcgtgattgaagtagataatttaatccatcttggattaaacaaaccaaaaaattaacgtgtctctgaactatccactaattacatccttgatacgatatatatttaatatatcgtatatttattcgttagttattattttattatttaatatattattgaagtattattttaattaatagtttatagattagtatatttagatatatatatggccgtgagttaggagattagttaggagattatttagtatttaattagtataggtaattatgtttcctagttagattaggattctagggttttatatctttaaatagtcgtcttgtgctagggtttttataatgaagagacaaatattaaagaatagatcttacgtttcgtaggaaatatttatgatacacaagagatcgcatcaattggtatcagagcgaagttgcgataacaccaacgcttcgttagcaaggcagcgattacatcaaagctacgctggagcaaagttgagatcacatcaaaactttgtgaaaatcatgatgtcagaaacaagacggttggagcgattggagaaatccgtagagagattacggattgactttcagaaattgctcgaacaaagtcacggacgacgtcaacgccaacacaaaagccgaagggaccgccgcccatcaccgccaacgccactgctaccatcaccaccgccgttgccgagcctatcgccggaggaagaggaagaggacgacgatgattttttcgaagaaccccagatttttgtgagttcgccggaagaagaagaatcgaattccactgagataaagtgggacgaagagccgaaagaagaagaatcggaatcaactgagataaagtgggacgacgagccgaaagaagaattatcggattcacttgaggtaatttgggacgaagacgaggaattaacaagggaggagaacgaagagctacgatggatattgggagatttcaatgatcttcaaaacaaagaagacgaaggattattgacgattttcaaggagattaagaaatctaacattgctattgagaagattgaggtatcactaaaagtgtcaaatatttcctcgatgatgtttaatgaattgtttgaccataacaaacaatacgttaaagagtcaacgatggtggagacatgtgatgaagtagtcgatcaattgattgagattcgtgttctcagcatcctacatgagaacaaattatttttgaagaaattggatggcatcaagcatagatggaagcgcaaaaaagagagagctgcaaatattcgaaccttgaggacaaggttcatttcaagaggggtggtttgatacgatatatatttaatatatcgtatatttattcgttagttattattttattatttaatatattattgaagtattattttaattaatagtttatagattagtatatttagatatatatatggccgtgagttaggagattagttaggagattatttagtatttaattagtataggtaattatgtttcctagttagattaggattctagggttttatatctttaaatagtcgtcttgtgctagggtttttataatgaagagacaaatattaaagaatagatcttacgtttcgtaggaaatatttatgatacacaagagatcgcatcatcctctctgtatttgaaccttttctggttataaaactatatttcaaatcacaaatgagtggctatcgttcctctttgatctgtcagttgctatataataactcaacttcttactgcagtgatctgtatccacatttttcttctttctttgaagctgttggaactgttctacataaacccgatttttttttaattttttttatttataatcgtcgattgcag

SEQ ID NO: 13894 - DNA, 1096 bp, Mimulus guttatus
  Intron number 1 from transcript mgv1a017547m (locus mgv1a0 17543m.g) derived from phytozome v7.0 (chr-ID scaffold_2; pos 3823209 to 3824304)
acaaaacaaaacacagaagctagggtttaaagcaggttcaatttctctctctctctctctctctccacaaatcacacactgcttactttcctttggatgctcaatctaattcttaattatcgatgactgaatctgggaattagtagattaatgtgctttgaaatgaaaaaatctcggacagctgaaaatatttttttgatgaaatgtttgagttttggcttaatttaattttttgaggttttcaatgtttaattagaagacaagcagtgagagaaagaaacactgtagtgatgtatttttagctcaaattattgctgctttgattgttgccaagtatttgagttaacgttgttctttctttgggttgtataggaagaacaattgcagctcattttcaatttgtgttttatgtaaatgcctcagatctaggtacatgagaaatttcgtcaatcaagtacgttgaattgtagtaacatcatctgatcgaaatatatgtgtgaattgtgatggatgcgattccttttgtttgtgtgaatgctaaatgctaatgatgaaaatcatgatctgcagtagttttcgttcttgcaaatatatttgtcaaattatcaaattattatgttgcaaaattgtaaacacgagagtggttattttattttattattatattcttatacgtcatgtcatctgcatctgcatctgcttttggcatggcacagatgttagaacaacattagtttaactgagattcgcattttttttctggtattacgtatctcgtcatctgcacccaatcagggtaagatcgaacggatgatgttcactaaaattatgcttgttcactagtcaactgtcactttctgtgcattttctaggatatcttctaaagaatacccgattatttgatattgttatgtaagttctctctcgtgttgtgcaatcctttggtggagtgtataatctgagttctaattaatgttttggttccgtggtttcattcttgaaaccctttggtagattgagttaagaattcagcttttgattgttgttcaacttcccgatttgcagataacataggattacagttgtttatcttgag

SEQ ID NO: 13895 - DNA, 1383 bp, Mimulus guttatus
  Intron number 2 from transcript mgv1a021652m (locus mgv1a0 21652m.g) derived from phytozome v7.0 (chr-ID scaffold_9; pos 3285409 to 3286791 reverse strand)
accattatcgaattgcatcgattacttggcaacaggtgtgcgcgtgtttttctgcatgtatttatatatatttttttcctttttttttttttcgatatatacttgctctgtttttcgattatctatagttctagtaatttaatgaattattagttacaagttacaactatacaattttttttacacgattttacttatattaattctctaatatcactaaatttaattgcatttcagtccttttcatatttcttttacaaaagattaatgcatattttgaaagtaaaaaaaataaaaatgttctgataaaagtataaaagtaaagtatgacaattattagacttattatattgtcacatgatgaaaataggaacgccactttaatttctgcaattattcgtcatcccatgttggatgactcctcaatttcatcccaattttttggttttaataaaagaaatatattatatattgattaattatatgaaaaaatatattaaacaaaataattttgttctaaattgaaattgtaaaacgacacataatataaaatattttttttcctcgatgaaatgcttaaaagaaacgagtagagtacccttaaagtggtattgcaaacgttttttgaaataaattataagctttttttttctcttattatttgtttttaggtatttacaaaatgacattttacttttatttctgcttttaaataagcatttgcaaacaccttgtggtgaagtttaagatttttaaattatataaatcaatattttattattaatatttattttttgcaatttggcaatttttgagctaaaaatatcaccactttttttactacgtcatcaaaattatttaaaagtcttaatcaacttgcagtcacacaagactagcagacaacatgtaattaaattatttccaacttccaattaaaagtattaaaaaaaaaaaaaaaaaaactcatgatcacatatgtgacaaatacaatgtcattttatatctctgtctaaaactatttaactaatattaataataaaataatattactacttgatcccttctctgtaccccgtgcatgttggaatttagcaatcgaataatcaagaaatgctgatttgattctctaatattgcattaattaaataattagttaaattattaattttatttagatctgcagaatcattaaatgttggttaggacaacaatgcacgcagtgtcttattattttaaataatttaaaatcaggcacaagatttaatgtttttttcacccccagtgataattaaaaactactattaattaaaaaataaatatttattatatttttaaatctattttccaggtggtctgcaattgcagcaagattaccgggaagaa

SEQ ID NO: 13896 - DNA, 1494 bp, Mimulus guttatus
  Intron number 1 from transcript mgv1a002305m (locus mgv1a0 02305m.g) derived from phytozome v7.0 (chr-ID scaffold_83; pos 683953 to 685446)
tcttggatctcttcgtcatccttccgttgcctcaggtgagattttatatatatatatatatatatgtgtgtttcattctctcgtgcacatattaattcttttgagaattaatttaaatatgaaaaagaagaagaaaaaaaaaaaactgtaagtaatcatcggagaattaatcatggtcatggaattctggtaaattacagcgaatgatgccaaattgtaaggattttattttggaattattgtgtcatatatatatatatatatatatatatatatatatatatatatatatataaatatgtcataagaattgtttgtatgcatgcagtgatgaaaggtagccttacattactgttacatattcttacaagaacatgtgaccatatcctgtgtgtatatgatccgtatatgcttcgtaggattgattaaaacaaatgaaatttatcaaggaaaatactcaatttatagaagattcgagttagtttgtttaatgctattaagctctattaactaaataatatgggttagtaagatgtttgattgatgagattcgcatttagtttaactcgctattacatttaaagtccgcaattaaatgttattatttggttaaattagtagcacccctctcctgcgattaatttagtggaaggtgattaaaagaagaaaaatacaattatatccttaaaacaatatcttaattttgttaattaaaagatttttttgacaatttacaattaatactataatttaacaaattcaatacaagatttaatcaaacgaatcaaatatcttattgactaaataatcaattagctagtcaatgggatgttaattcaatctcacataatccaatgtaattcgatatagacaaataaatgagtccgtatattagctaattatctagaaaaaaacataattttcaaataattagtggagtttatgagaatcatggagacgatttcttttgatttcttgaacgtttccataacaataatatatgattaaataattattatgttttcatataaaactaattaatcataacatcactgttttttaattgcaacttcaaataattttcgttttgggttgatgtatgcttaattttcacttaataaaataataacaatatacgtgaattttagagaattttctttgccaaaatagccttctcattaataattttaattttcactaattatttttcaattaaagtgacaagggtaaaattgaaaaacataataattaattaaaatttgaaattacaaagtgacaattattttgaaatgaaaagaaatggaatttgcaaagtttatagtccaactcaaataattgaaaatctcaaaatttgaattgtagctatataagtcatgtcacgggctagtcttgaaacctggtctaggcttattagctaatcagccaaaaattgttttagtttgtactgaaaaaacatgatttaagaattaaagagtgattaatttgcagatagta

SEQ ID NO: 13897 - DNA, 2792 bp, Mimulus guttatus
  Intron number 1 from transcript mgv1a013493m (locus mgv1a0 13493m.g) derived from phytozome v7.0 (chr-ID scaffold_148 ; pos 602479 to 605270 reverse strand)
aagcccccaaaatcgtgttgctttggtcggtcaaggtgtgtattcagttatttcgtttttatttgtcttctttctgcttgaattgggattggtttcttcgtctgcagtattttcctttccttcagtatgatttgagtgtggaattgttaaattagggttacggttattgctttctttttgaattttcaaattagggtttcgattaggtagtttcaactcctgtcgatactgttaacaagtatccttttttttttttttgttttgtagttcagttgtcatgtgtttctttgtgatttggccgtgtgctttgctttgaattgtaattgtgagtttcttattttgtcatttaatttcttgtattagggtttttctaaaccagattttctctaattctaggtttccctgtgccattatgtacggtttatccatgaactaataactgaaggtcattctagtgtagttctctggttttacttgttggaaaaatgtctaatttcctggtttttctagctgagtaaatagttatattattggtcatggaatataactgcatgaaagatgcaagtccgtggcatggaattagtttctctcatatttaattttgtctaggaaagtattttaattaaacgtttctgtccatctggttttggaaatagttcaagttttggcgtgctttaaatgttgtctaaatgttttccatattagaattcgtttgccgtagttttattaaagttggatccagagatttgcaaaaatcagtttgtttagttcataataacaaaatagtgttacgttaccttcttgcaagtgaaatatttaatgaagtaaagatatcgtaagatgcggggttttaagttaagatgaaaaagcttaaacctgaagtgattaaactgaaggaaaccctaattccaatcacatgcaaatgaaagtcataatttaacacaagtacttgaaaaataagtataagaagataactttttattctccaaaataaagtctttgaaatgaaaaatctacttctgaggtgatttggaattaaattacattcctagaagacaaggggagagggaatgcgtatgtttttagtttcatttcatttcatttgtcaattggcaacgttgagaggatattagaaagaaaagaaaaaaaaatgatgcaaggagataatataaccaatcctctattttcttcaatttgctagcattttcttcattctaaaaggggtaccaaagagataatatacatgccacaattttcactagaaattgtgagttgatgttttgaatcagacaccatttgtgtgccttgttctaatattttcagcgggtcagtttcaggaaaatattatcagttaccgcaaaatagagatgcgcttaaaacttgaaagttcattagtcccctcctcatttggagaaataacaatagctcataaattatattaacttaatcaccggagcttaacttactataaattcacttaaatggtaaggaaagtttaagtggaggtaaaaattacataatatatgctatcaagttacgagatacaatgaatatgcggaaaaagttcaggaagtcaaattttatatcgaccaagatgcggagttataggccaaattttggtgtccatgtgcttttcacctgtgtccccattgcgtttgtgttttctctcattttccctttgcgcaacttgaaaataacattttgtgagtatttatggctgcgatataaacaaagaagttttttcccacgtgtcacgacgcgaatactgctatactttgtaacgcttagaaaatttattggcacagtaatgacagatggaactctatctgggtcaaaggttgtggccatgcgtcacttttcttagtttttggatgtgatggtgtcaactttctatgcgattgcataaatttggggttttgcactgctttttcttcttaaacttattgatattctttttgatatctcatcggtaggtagtaatctgattacgtgacccatgaagtaaagtttccagctttcccgcctgttctctatctcaagttattgtagacagagtgtttggactcatttttctttattgtttgcagttattgtctcataatattcctatcgttcagttacattgttgttgatgattctctctctctctctctctctctctctctcacacacacacacacacacacacacacagtcacacatacacggcgaaaatgcttgttcattctacgtttcagtcttgcttcctttaagctaagtctgaggtaagcagcagattagtattctgtaactgttgtcggggcaatacaatcttcaacataactgggggtcgaagtgttattagaatgtatactgattgcagagtaactgaggatccatctgtagtgatttcagctgtttgattcgctaaaaggttttgattagtaaatgccatgaattacgtgcttttgatttctgtaaagatttgtagaagaatttctttcaccagattctctctctctggcttcttgtgcagattaaccaccttttttacgttcagatcagggatctgtaactgttgaactttgactatttcgctgtctttctaaccttctatcttagtgtgtattgaccaatgtctcgtgttatcaggaacttcctattattggattctgtttcatgaacttgatatgttattgtttcatcgaattgcttttccttattcatcatggtctaacttgcagagattataaagaaaaatcactggtcaagtaattttatttttctttgtttcagtgaaatctttggcagtt

SEQ ID NO: 13898 - DNA, 686 bp, Mimulus guttatus
  Intron number 1 from transcript mgv1a018578m (locus mgv1a0 18578m.g) derived from phytozome v7.0 (chr-ID scaffold_460 ; pos 2040 to 2725 reverse strand)
ctgctctcactggacctgaactcgaccaagtcaaggtacatcgtactccatcgatcgaaatctcgacaaatttttggtgtgtcgaatttagtttttgtacaattattctcaaattttgaaaattttaagttttttcaaaagttttattattaatattttaaaattttcccacgtgaaaacttttgatttttttttaatattgtcatattcttttaggaacggaattgaaattattttttattctaaagaaatgaattttttttcaagaaaaaatagtagctagattttttttttttaatactaatccctcgttaattaaaatatctagttgaaatcttttaataataatcaaattctattttgtagtatattagttataaggtcgaggggtgagcaaaaataacgaactgatagacgaaatcgaaaccgaaaataaaccgaattgatactgaaaccgttaattgaaaactgacaaatcgattagcaccgaagcgtaaaaaaaccgacatgtttggtatgcgttttgataattgcaaaaatcgagccgtaccgatttttttaattgtgggccggagctaatttgaactttattgaagccagcatgttataactaacctatactatttatttaattaaattaacgtggtgcaggattcggaggacatacttctacccaaggacgagaa

SEQ ID NO: 13899 - DNA, 890 bp, Mimulus guttatus
  Intron number 3 from transcript mgv1a000528m (locus mgv1a0 00528m.g) derived from phytozome v7.0 (chr-ID scaffold_6; pos 1159702 to 1160591 reverse strand)
ggacttgggaaaaccatacaggtacggatggaattttgaatttcgtagaatttaaatatcatttttaagggtcgtatgctatggacagtgatccttcttcgtttcttctctccgtgactatttgtactcgtacatgttttacaaatgagaaacgtttacatctgtcaaaatcaatatgaaaagctatgttgcattatcttggatggaagcttctttcaatggctaaagagttgcatcacaaaatcggtgacattatgatttcaatataggctattgcatgcaagctggtttcattgaatgggattgtattgaagttgctaccgccatagttgtcaaaactgaaagtgtgagagaagcagaaaaagaaagtgcactgctaaaaagtatgataaaaaaattagagctgttaaaaagtatcttaaacaaaaggcaccaagatttgcagttgcaggacttctttgggtgtaaaaactacataaactccattgatgttctcaagaaaatccataagacatagttgcaattttttcttatttggttctatttgattaccctcactgaaatttatgttgggtgcatctcctaattttgctagaaaaaaatgtaaggtgtattgtagttacaatagatgctctatttcgtaaaaaatgacttataaatagcttttagagctcatgctttctttagaaggaaagaattgaaatatacatagtgttgaaaaagtaggttaaaatgttgagttctatttgttaggtgtagaaagccacgacaacatctgacttcgtgttacattatgaacttattgctacaaaatctttcttgatcaaaggatttcttaactaatcacactcctcggattttaataggctattgcactggctggctgtttc

SEQ ID NO: 13900 - DNA, 1799 bp, Mimulus guttatus
  Intron number 2 from transcript mgv1a021944m (locus mgv1a0 21944m.g) derived from phytozome v7.0 (chr-ID scaffold_62; pos 1379977 to 1381775)
ctatcaacgcaaatgtttagtaaaaaaaattctcaattcttttgagttgttagttaatctctccaagttaattgtagttatacacttctaactattctgtatattaataaatgttgaataagaaaaattgttaagttcacttggatgtgtgttagatggtgaaattacagactgattccctttagttcaaaaattctctcaacactttccatagatggttttacttcatccgtaccccaatttttgcatgaaagtttatgtattcatcaaaactattaagtgaattttcttattttatccttttgaccggaattgactattttatccttattttatccttttgaccaaattcgggtagaatgttttatttgttgagcatatatatatatatgttgggaatcagacacgtgtacgcagcggaaaacaaaaattttatgcgatttaaacaaatttaaaacacataaacacatgcccgataattgaaaacaattaattgcgtacctttgcgcttccagcgaaattaaaaacaacatacatgcttaataacttaatcgaaattaaatcaaatagcatgctcgcgtttaaatcaaataatcatgctcgtagtaaataaaacaatttcatgtagtcacataaaatcatacaagtttgcttactaacgaacatgcatatttaatttaaataaaaacgaatcgaataaacacggattcgaaactttacctcttgaagtgtgaggtaggcgcacgaaacgaagctagattgccacagaaaccaatccgtgcaatccgtggcagcaacggcgaaacggcagcagcggtggtgcgagctacggcggcgcgtgtggcttacgcactgtcttcgggcggcgcgtgggagcgcgtgcgtcgtcggctcggggctgctcctcgattatttgatcttcctcttctcggcggtggtggccactgagaagatggccgagagagagagagagagagcggctagggttttgtgcgcgagttgtgtttctttttttgtgcaagacctataaatcaagtatttatagtgtcttgtataaaacacctaacgggcttaagttggaccgggcccaacagcttaagttcgttagttcttttactcgctcgtctctctcaattcgatgatcggaaaatcgtaacaattacattttcggaattattataaagtcctcgtcattacgagtgtcaattctcaatttccaactttctaaaagtggaaaccctatatcagtgtgctttctaaatttggaaacttcccgatttagaaagtccactaagatgttcgcctattattttccttttcttttctcattcataattccaaattatgaatgttggacccaatcatattgacttccaatcatgcaaagataaaacatttttacctttgaccgttctttcaaagatctcatgtgcacgagcagtgtgaccctcgatggttcaggtgtaagctagccgtgggcccgcaaccctttgtggtcaaaactcttcccttagagttatgattaagatgaagctcgtttcaccttaaccacccaacgaatcaagattggcgtctagcaactacgcgtcatgattccctagatacaaatgaagtgtctgcaacaaccttttgatatagttagtgtacagtacgatcccttcgattcatatgtcccgattgaactagaggcattggttcatcgagacctccttagtagttcaatgactgtgcgatcgttctaagtgttgtaatcgttacgtgcatgacttagagaatcgaattctctaatcattacttag

SEQ ID NO: 13901 - DNA, 2186 bp, Mimulus guttatus
  Intron number 1 from transcript mgv1a023748m (locus mgv1a0 23748m.g) derived from phytozome v7.0 (chr-ID scaffold_9; pos 3062602 to 3064787)
gtctacactttcgacactgtagaagaattctggtggtatgtctttacgtaaaccctaaattatttttcgctttatgtgattgaattttgtagcttagctttattactgtgatatttaatggattgtttagttgaagatatttttactctttgaatgctcgttgctttgccaatgtttcgtttgttctgccgtagttcgtgttatttaattcacggactatgttccgatttcgataagggtgtatgggggattctagaggatattcggaggtgtgtttctggtttggggtgggatatttatcctttggattcgttgaactttaacaggcatcgattaggttaagaaatttgaatttaggcgtcaaaatcgatgttgaaaatcgtaatttttgaagttgtttgaaagaatgtgatcaagaatggagtggagagaggtagggtgaataacttctgactctgttagaagagagagatataagtagtcgaactaaataaattcaactagaattaatgttaaggctccaagcaaaaagctcttgatttggttgcaagattatttttacaatgcaattgaatatttgaaatacgaaaaaaaaggtcacgtagaaaagtatggcaaaacatattacacggatcttccgtttccgtacaagtgtcgctaagggaaatatatatcatattccaaaggatctgaaacctctttcatttgaaatcataggttagacgaaaagttaggtagttcgagcaattgtggatggaggtagtatttatgaatttcccttgatatgattcactatattttgattttggtgcattggttacaatcttgaatttaaaattattttttaggtgataggattgtaaattccttttaaggtcgattcactactagaaactacctgtcatctatttcttaccgtgtagaaacataattatagaggagtttaaaggaataaagttgaggctaacacttgtttgttcaaacttgttgaatttttttatcgagctttcaaagttgtgtttgagcttggtttgataactaattgagttgagcacaaacgaactttaatcgaggtgaatatgaatcgagcttgagtagcttgattttttgtacatattttattatttttcttcttatcgagctatgtattcaatgcttggttcgttatgtcatcaaatcaagctcaaataggattttaaagaacaacttgaatcaagtatcaaatagtttggtttgatttttcagccctatatatgtcactatattttttcaagttagtacttttacagtttcaattaggcctttaagaattctgagacagaaaatcgccattcagggacagggtgtgtttctgtggggacttgattttgttgtctttttcttgactatattatatttaatgcttcagaatgtattagttttggagtaatatttacagtaaggatttccgtctaaatttagcaattttacagactaaagattatgtataaatacatttttaaatttctactgaattaaacgacccaaaaaatgagaaccgttttcataaaaaaacattgcctgtttgtcatgatggaatggctgtggtggaattaattaattaataatttctgattaagaagcaatttgttattactcggtcatgattttttggttttaaagcaactctgtagaattttgaacttttcttttgttttttagaaggtcagaaattttatagttacttgttaaattttggtgggtggattatttgcttttaaggcacagttattatggtcttgaatgactgtgagatttataaagatgtgttagcgtaattgtggcaagaaatagagatgccgtaataaatcgtaatctatctttcaaataccaataatgagattttacgtttgactggatgtagcacaatgcattcaatgtgttatttgttgcaagaacccttcgtgcgtgtgtataaattcgtgccccctctcgtagaaagcctcatccctttgtcttctcccctgtgattcactttgtctcatgtttgcaaatttgatttttttcaaactctctccttatttttctcaattaatcttacattgtcaatggcccgctcttggagcgagttgagtgtagatcataaacttgtctttttactcgaaggtttagcgagagagcaagatcgtacaacaccaattgcttgt

SEQ ID NO: 13902 - DNA, 213 bp, Mimulus guttatus
  Intron number 23 from transcript mgv1a000752m (locus mgv1a 000752m.g) derived from phytozome v7.0 (chr-ID scaffold_36 ; pos 1232212 to 1232424)
cgcaaggtttgaaatgtatcattagttcgattaattttttcaataccatgatgactaataaaagcaacttcgtagttcgttagagaacactttaaattctgtgaatctgaataatgctctattgtaatgaagattgaatattcacttcttttgttatatttgcaagcaatttaaaattccatctgttctatacgcactatgaataacagagag

SEQ ID NO: 13903 - DNA, 439 bp, Mimulus guttatus
  Intron number 1 from transcript mgv1a004372m (locus mgv1a0 04372m.g) derived from phytozome v7.0 (chr-ID scaffold_87; pos 986072 to 986510 reverse strand)
cagccgtgactcgtacgattgtcgaagttattcaggtgaaaaaaaaatacttatcgaatattctgcgtttttgtaatttatgaatttgtttgcattttgtgtggggttttgccaatcgattgttagtagttcttgatcaattgtcgggatgtggtgttttttgagcactcgtgtttacgcttgatagtcgaagcttggtttagttagctgcatttgttgggcttattgacatctgttttcagtatcgagacttttgcatgcgttgattgttttgtggagtttgaatttgtcataaccacaagtctactttcgtgacatgcaaatttgtttcgtctttgtcaaattggttccatttttcgtgctgatttgcttaatctttcttgatttcaatattctaatagcttcgttctatttgcagaattgccataagcacggggtc

SEQ ID NO: 13904 - DNA, 1207 bp, Mimulus guttatus
  Intron number 1 from transcript mgv1a025271m (locus mgv1a0 25271m.g) derived from phytozome v7.0 (chr-ID scaffold_82; pos 968296 to 969502)
taaaattgtaagaaagttacatgactaaatccccaaaataggtcaatatagagaccaaaactacaacagattgactgacattcacagcacaaattgtgtcatctctattgttgcttccaattattttcagtgatcttttgaattcaatttccataaatagtagcagtactatcatcatctcccctattaagtttcaaagttcaaaaaaatagattctttcagtaattaataattctcattaactgtgatttctctcgagttctttctcccgagttctttctcgttcacgggctgtagtttgttgtatacagagatcttgggaacggtctaaataaattggcgggattcctcaattaattgaattgtattttgtatttatttttcgagaaattccaaaacgaaataaataaagacacatataggaacaacaaattgaaaattaaattttcttataaggaaaaatgttctgataccaattaatattttctaagtttttaattttcttgattcttcaatatttatatttttcatataaaataaaatttaagttatattattgaattacaaaatatataataaaattataatatacatttcgaaaaatcatgaaaatattcggaactaaaattagatcggaagtcggagtttccggtcatttcatatatcattccaattcccttccaatcaaaaatcgaaactttgaaatttgaaatgtaataaacggttacgaattcaaatttgttcggatcagaattgaccaaattcggaaattccattccgattttcacccataattttaccctttaacttaaaataattatgagaagtacaaacaaaatttgctctagcggagaaaactaaaaacatttgtgaaattaaaatttaaaatcagatgctctattcccctgttaaattttcagcaggtcgacgccggcggcgatagccaccggtcagcggcgcaatttgaggaaaggaaaactgaattctccaatcttcacatttctcctccatcgtttgaactacatcttcccgcaaaaaaaactcatgcttgcattcaaattcccaaagctccaccgcagacgcctccgctcatattgttcttcaattgctgccgattcagaatctagttacctcaacaagcacatcgaatctttcctctctaacaacaatggcttcgaagaatccaggacaactcttctctccacgc

SEQ ID NO: 13905 - DNA, 1122 bp, Mimulus guttatus
  Intron number 1 from transcript mgv1a002379m (locus mgv1a0 02379m.g) derived from phytozome v7.0 (chr-ID scaffold_51; pos 734395 to 735516)
tggttgtatcaacagtaagtaacacaactctctacattccccccgaaaacagaaatgaaaaaataagaaggttgttttcatataggtagctaaaaacggaaataagtttaacagtatattttgtactcacaggggtcatcaaaagcaggctttctgggagaagtctcaattgattttgcagatctagccgaggctaccaaaccattgaatttatctctccctctacagacatcaaaatcgggtgctatattacacgttagttcttactcttgatctcttgcatgttcacacacaacacatgcacccaaaattagatgtgcagataaagagctagtatccagttgcattatcattgtttactatcataatggtgtacgcataaaactgcaccagtagcaaaatctgtcctaaaactaaattgcaattaccaggttacagttcagaagatgcaagaaggttctgattcaaggtgaggtagattaacaatgatgatcaaaaaaaattctctgttaaaagtgctgaatacagccgtaaatggtttaaataagaaaaacaggagcaatttttttcttttgaaaaatcgcagacatagtgaagacagtgaagtgccagtggatgacttgtacgatcagaacctcgaaacagaagtgaataattcttcgagcttcggaaagagaaacctgaaatctcctgaagtaaggtttcacattatcaatattcctgattttagttgcatacttgcaccaaaatgaaaattgattagggaccaaaaaaaactagaaacttagaaagagggagaactaatatatatgtttctgattcattattggctgcattaatcggaagtagaattttttgttttgtagagtgatgacttgagtgaagcaacttctctgcacgacgaactaaatggaagcttagaagattcagaatcatatagttatgattctgaatcaagagatggagtaaaaagaacttcattgacaaatcaaatgaaagtgttggaaaggaagatggaacattcagaactagaagtacagtccctccgcaagcaaattaccaaggaaatcaggagaggacagcagttatcagagcaaatttcttgtttaaaagaggaaaaag

SEQ ID NO: 13906 - DNA, 1287 bp, Mimulus guttatus
  Intron number 3 from transcript mgv1a022549m (locus mgv1a0 22549m.g) derived from phytozome v7.0 (chr-ID scaffold_257 ; pos 269487 to 270773)
aactacaccatccattggaatccatctcaagttgtgtaagtctttttattttaatttaattaattaatctgcaaattatattaattatatttatttccaataaactataattaatctaatttaatttataaaagaaatatttcatagcatgaatttttctaatttttgaagtacgaaatgaaattgatgactgggaatctggtcctttgttcgataggccggtgcacgagtttaggaaactaggttaaattaagagcaccaactggaagattccagcgaattagggtcaaattacgaaaaactcctcgtgtttgggtaattacaatcacctatgaactatgaatcttcttatacgttttagtagaatcttctagtttatatggaatattttctaatttgtacctgttttattcccgacgagctccacattttgaagcaagatgatcataaaatgtgtttttttggcttgtatatatcagattgtggtacatcagaaacttcacttttgcacaaaacgagtacaacttgagaatatttcacggaatttagaagattatgttgaatttgacaccataaggatggacgtgtaagaaaattcataatcgacgagtagttgtaattacccaaatatgagggttttttttcttcgtaatttaacattatctcaggaggtggttgtagtttaccttaaattttattctacaaatttcaaaaaaacaaaaagaaaattataattgaaaaaataaaatttatgaaaaaatttattataatattgtattagaaaccaaaccaggcataaaataaagggtaaattacaacgacccctgaggtatggtcaaattacgaacccccctcctatttgggtaattacaaccaccccttaattataaatatttttacatgtccacccttgcggtttcaaatttagtggaatcttcgagattatatggaatattgtcacttttgtacgcgttttatctcattcgaacttcacattttgaagcaagatgatcataatatgtgtttttcggcatgtatatatcagattgtggtgcatcaaaaactgcatttttacacaaaacgagtacaaactagagcacattccacgaaatctagatgattatgatgaatttgacaccataagggtggaggtgtaagaaaaaatcataattgagggatatatataattatccaaacaatagggatttttttcgtaaattaaccatacctcaggagatggttgtaatttaccctaaaataaataattatgaatttatttcaggtggt

SEQ ID NO: 13907 - DNA, 1074 bp, Mimulus guttatus
  Intron number 3 from transcript mgv1a000152m (locus mgv1a0 00152m.g) derived from phytozome v7.0 (chr-ID scaffold_16; pos 1737099 to 1738172 reverse strand)
cgaggtttgccattttaaccatctttgttactccctaatggtcctcatttttatatattttgcccagttgcttactaccttatttcatcacaaatttctgttatgactttaacactatgctgttctcattctgccaataggtggttatggtatttgttcatataataacttatttgtttgaatcctcaactttgtccagtatgagcgttcttttgtccataagtcagttggagttttgcatataaaaatctatatagcattggaaaagcacagctgaaccatgctaatggagtccacgaatttttgtggaggaacttagctagtcattggacttcatacacaatctcaatggaaaacttcattttgtattaaaaccgaataagttaaaaagatacatattgatttttgtttttaatttgtggataaagatgcagtcacttaggactccgatgattttcctttaaattcttgatatcttggctatcctcttattccttctagaccaatcgccacacccttttccaatggccttgcacccattcactgtcttcaaacatttttgttgtagctttttttttcaacttcttatggttttggatctcttttcagtaggggactgaacctctattttgtaaccaatactctcttcttcctcaacgattctgcatcttgaattttatctttaccttcaatggtattagcgaatcgtggaggtttggccacaattcatagatttaattgcatatgatttgttacatttgaattctattttaaattttgctatttgcatttttacaataatctcatggctatccaatataactgcaaacttacatctttgaactaagaccttgaaacattttgatcctcatttttttgtcatctcgaacgggagctttcgtaactcaatgaatacacatctttatctcctaaacttgactcccagaacaaatattcttctacgacgtagacctacataattaattcctaatctgatgttaaactgatcagaatttagtatttacaccttcctgtgatttgatggactcacttgaatacattcttatgcagttc

SEQ ID NO: 13908 - DNA, 560 bp, Mimulus guttatus
  Intron number 1 from transcript mgv1a012181m (locus mgv1a0 12169m.g) derived from phytozome v7.0 (chr-ID scaffold_102 ; pos 665663 to 666222 reverse strand)
ctgccgtcatcagtttttgatcttcagatattttggtatttgctcacttttctctcactagatgattttgtgcttctttgctatttgactttgttggtttgacttgatttggctgatgacggtcgtttattgcttcggattttatctagggtttcagtacttcgtttttcgatttgggtatacttttttctgttttattgcttcatttttctatttgattttgtgttgtgatttctgagtgttgattgaacttaataataatagaattccgaaaaaattgaacaaaaaaatcagactgtttcattgcacagtattgatgaacaatttattcacttgaatacttgttgtttggacacgatgttagtagctttacgaaacgaaatgagatcttcgtttacttttatttataaaaaagatattcattgaatttaattcgaagaatctggctactcctctgtttaaccgtgttacttttccgagccccctttttaagtttttatcgaaccttttatatgaacgatggaggaagcttgacgataaaattggtggtgccgactggt

SEQ ID NO: 13909 - DNA, 1134 bp, Mimulus guttatus
  Intron number 1 from transcript mgv1a005464m (locus mgv1a0 05464m.g) derived from phytozome v7.0 (chr-ID scaffold_3; pos 3739552 to 3740685)
ctccacactgtgagtagataaaatgaactaaaaaaaataaaaacaaattacttttttctcttttacttaaaattgatttgcaattgaatcaacgagtttatacttgggtacaccggttagatctttaccattcataagcacacaaacacacacacatccacattggtgtgtgtagattaacggttaaaattcacccggtgtaaccttcaatttgtgtagcatagaaataaccgaatcaatgtcttggatctgatccgaaatttcgacccagtccaaattcgatcacttgtaacattaatggatcctctgtttattaatatattttggctacttaagaaagaatgaatcaacacttatctacttcaagtgttctaagtaaagtaaggagtagtgctaaataacaattagggcaaattacgatcacaccatgaggttgggtcaaattacgaaaaaaccctcatgtttggtaattacaaccatctcctcaactatgaatcttcttacacgtccacttttgcagtgttaaatttaggggaattttttagattatatatattgaatattcttcagtttgtactcgttttacctcattcgaactccacattttgaaacaagatgatcataagatgataagatgtgtttcttgacttataaatatcagattgtggtgcatctggaactgcatttttgcaaaaaacgagtacaaattagagtttaaaccacgaaatctagaaaattctgttgtatttcacatcataagggttcataagggtagacatgtgagaagattcatagttgagaaggtggttgtaataacctaaatatgtggggttttttcgtaatttgactttacctcggggtgggccgtaatttactcttacagttaataaatatccatttgttcatttaagtaaatgatgttgttctatttttaccagcacatcaaaatttatgctattctgttgctatatagaatcaactgctgtttcttctatgttagaagtataaaactacaaaacgtatattcgatctttattttattttataaccgttatcttcaaattggttttcattttcttgcaatccatgaccatttcattgttctgtataataattaggcgaaaaaattgaaat

SEQ ID NO: 13910 - DNA, 1736 bp, Mimulus guttatus
  Intron number 1 from transcript mgv1a023274m (locus mgv1a0 23274m.g) derived from phytozome v7.0 (chr-ID scaffold_191 ; pos 207772 to 209507 reverse strand)
ggtttggggtctccttcccgtcgacccacttccaggtattcgtttgtttgttcacattacgttccggaagatttgcgttcttcagtggggaatttaaacaaacaccttgtatacctttagtaaggtgttcccattttttttaaaattccggcggcgaatatcaccaaccactatggcaacctaacctttgtgttctcgagggatttctgtcgatattgttgttcagatgactcgctaaaaaaaaaactttgcctctgcgtggagaaaaaaatgttgtatatgagtgacaaagtgcaaccgttactggaaaaaaaggaaatttttctttagcaagtttatcctagataagctttctactctaactatgataagtgggatttggccaattggcccaactaattgtttttttcttgacataaaatgctttaactatgataatgggttatcggatttttttctctactgatacggatgatgggttatcggatttttttctctgcggattttttgtatccaatataactaaatattatgttgagtatttatcatcgaattttgaggaagtgaagaaaatcgacagtgaagttccttatagtacattttatctcttgcaaagagtttgcttgaatcgtctggcttgtttgtaaggatgagtgatctagcatttgattattatctccctagtttataggagtttcttcgattctgtagtcataacacttttctgatatggttacgtttatcgtaacttttactgctcaactagactctaccataatttgtccaattatgatggcaaattttacgaatgtactttttgaaatcatgaagtgttataatcccgtttctttattgccagagaccgattttcaatcatatgggcttacttatcaattgtagttcgtatatgactatatgtcactttatctcattaatatgtgttttgtgctgcatattttcgattgaaggtattcgcatttcatgcttcaactattctgtatttttcaggtgaacttgaatattatatcttcagcaaaggaacatagaaagtgggccgaaaaggtactcttgtttatgctttatttgttaaatcatatgcccgtacacttgcatcatttcactaaagctatatgagatttgtcgtaaaggggaatctttacgacaacttgatcttgaggccatacaataacttgtcgagctaaaaatctgatatctatcttggctgctgtcatactgctcagactcgattcccgtcacatgtttgcctaagcagaatatggagaaaatttatattcctttgtataaaactttttctattaattttgctcgcaattcactaaattatttatcaaatttaacagtaatgtgtatgcagaggattatgatattcatattccgctctcctctatatgcattagtatttataaattattgggcgtagttactttcactctcaacttgttgagccgccttcactcttgaagtgataatattttttggttgatcgaaaaagttaaacctaattcacggaactggttggagagtacgagtattcaaaaactggataaatttgagacttttgcaccaaaaaaacatcttagagcatactctattcctttcctatgttatcaaatgtgatattaacttccatcatctgacgttttcttttaccgtttttctggcatgtaatcgatgttcttcttcgtctcctattaaatgtaaaaatattttttagg

SEQ ID NO: 13911 - DNA, 989 bp, Mimulus guttatus
  Intron number 2 from transcript mgv1a011236m (locus mgv1a0 11236m.g) derived from phytozome v7.0 (chr-ID scaffold_85; pos 342421 to 343409)
atcccgccgattatcggcccgacattgcctttcaggtttgctaattgctcgcctacaaagtttattatgtgtttgtcggtacagaactttggttattgtgatgaataagagttctttgctctgttattttatgtacagtttggtatgtatctggttttggtggcacttacaactgatataaaagaatatctttggtagacttttcaacttaacatatgttatgatgctatagcacccacatttaattcacagcagagactacgagtgcattttttttaaaaccgtactaaatgtgttcgatatttacaagaagatagattttaaagatatgtgtaatacaattttggaggaatattaagtcataagaagcctaaatctggactcgagctccgataaaactgttgacatatgcctactcgttggactcgtggtattcttcatatgtcaagatattggttcaaagtaaattggaaataagattagtttgtctattggtcaagttcccctgtattcgtcgtatttttctgtgaactatgcataaagctcttgaggccatgtttggctgccaagataggattagccaacataagattaaataatcttatgaaaacataattgttttggtggaccatggaaagtccaccaaaaagctccctaaaaggcaagataagtcatgataacacataatatttccaggtcgactcagaaagttttgagatttgccaaacggcaaacaaagtccaattatttaggtaatcatggctaatctccccaaccaaacaaggcctagatgttctcttctcttgcctttgatacacaattttttttttttacctgcaaaactattgcccgaaaaatggatatgttttttcttccacattagatattattgatctcaagttgaggtactttctgtttctaacaaacgtgcattcgacatttccaaacttttaggcgattcaaacaattttagacagccgtgtgaacaa

SEQ ID NO: 13912 - DNA, 998 bp, Mimulus guttatus
  Intron number 1 from transcript mgv1a012252m (locus mgv1a0 12252m.g) derived from phytozome v7.0 (chr-ID scaffold_181 ; pos 429973 to 430970 reverse strand)
tctagggctgcctcctattctccgtttcacgcaaggttggtattctgtgctttttaatttcttacttgttataaatctgaaatattgtggtttgtttgattatgaacaagtattatattatacacatgattttgtttttgccccaaattttatatttataattctgagtctataaaattcttgtattatccccaaatttggtttcttttgcatataattactgggttgttaatagtagttattagcatcattcaatctttttataattatgaacaaggttgtaaaatacaggaatcggacccaagttggttaggtcacctcacgattaatcggtgttgcgcggcggtggtgataaatcggtttttttaagttttatgtaatataattttagatatttttttgcaaatactttaaatatattaaatatgattttatccccatcatttatatttaaatatatattaaatatgattttatcctaatcacattttaataataataagatcataatataataaaaattcttacaaaataaaaataaattgaaaatcttgttcatccaaaattatatttgaacattggaagcatatatcattaggtcctaaaaaaaaaagtaaaattaacaaaataaaacaaagcataaacttatttctaaatgcccaacttttcgttttatttaaaaaaaaaagaaaaaaaaaaactgatttttgtttgacccgcctccaaggtttaccgcaacccaactcggaccgcctacaaccgcctcactggtaaaaaccgaaaccgatttttcagacatttaaactaaaattgtaaagtttttagaccgccttcgccccagagaccgattaatcgaccgcctcgaccgatttttagaacactgattatgagtagtagttggattagccttgtgtttaagtggaatcaacattactctaaaatttccttcttttttacttatttttcaaacaaatcatgtttcgaacaggaaaaaaaaa

SEQ ID NO: 13913 - DNA, 1239 bp, Mimulus guttatus
  Intron number 1 from transcript mgv1a023223m (locus mgv1a0 23223m.g) derived from phytozome v7.0 (chr-ID scaffold_76; pos 444410 to 445648 reverse strand)
ttgaggtggtggagaaatatggtggggcccacgaccgacgtggggcggaatgttttcgacggtcgagatcggtttcttccggttcgttggattttcagaagcagggcgacgatattattaggagaatgctgttgaagaatcagatagatcactgtttttcgaatgtgaggtgttgttggtatccgaaagcatgcatgccgttttgaggtatatatctatatatatatatatatacatatctatatataaatttgtttgatggattaattatccgagaaattcgactccgaattgcgtttcgtagaagacgatgtagatgtatagaggtttatagggatgggagagagagatatatatatacacatgtaaatcttgatgaaagaagatgggaggtggtttgttcgaattatttgttgcgattattcgatcgaattcgagagagtaaaatgtgttcttgttggattcgcggaataattatttatgaatttcaaattgcaacaataaacttgcaaagaatctttagaaagagttgaagattattgcagtaagaaaactaattattatgaatctccacttaacttgtcataaatatactatttactccatccctttctttttaaatgttgtttgaggtccatactaattaagaaaactcagagagttattaaaatggttttgattttagggggaaaaggaatatttatttgacaaatttaccccatttgtaaccttttatattttctcattattgtagaacaacacttaatggtatttgcaaaaacttattaaaaaacagaagttatagattgagagttaagtgtgtattaaatgtttatttctaatagtttggagtgtttgcaaatattctggaaaatgcatttaaataacaattaaaaaagaacaggcctaagggtattttaaaaaagatagattaaaacaacttattttaagagaagcaaaatgtcaagttgtttcaattttcagtttcgattttaattttacaaacacctaaaaacaacggagcagtagttaaccaaacttaataacatatattgctctttcatatattcttttcgtttttatttttatttttatatttacgattttgtttaacagaaccggcaactttttacaatatttttgtatgtagaaatgatttcaatatttatccaactttataagttttacctagcaatgagtacaggaagtcgtaatagagttttcgaactcagtcgattt

SEQ ID NO: 13914 - DNA, 807 bp, Mimulus guttatus
  Intron number 4 from transcript mgv1a010636m (locus mgv1a0 10636m.g) derived from phytozome v7.0 (chr-ID scaffold_2; pos 3369655 to 3370461)
ggagaagagagcaatccagttgaccgtagaggaaggtacagaatattttattgattttttttttaattgctaattgatattcttgtttggggattagattgtgtcagcggtcggaagtttgtattacattttgcatgcaaatgtgattggactagatattattgattgaaacttgagctatatatagtgaaatcatcaagaaactcttttggggaaatgaaatgaaaccaaaaataacctgcatttccggtgatcggtttagtatttaatatggttggcatttaatattttgaaaattttcacagaagttttagttcaagtttgtgtaaggcagatgattcttccaaagggacctattgaattattgatacatgtaaacctctataaattaatacagtcaggactagggaaattctattaatttagcgaattattaaattattgagttaataatttaacacgttttcaccgagtcgagaccgggagaaattattatttaatcgaagttattaatttatcgaggttctactgtagctaattttctttgatgtgatatctttgttcatgtatcttctaacctagcttgagatctgagatatgaagtgattaaatccataaaatcagctacaaagtccaagaatagaatgcagttaactagtattattataaagtcaaacttggtcttgacgtgattcgatctgcatgacataaataagttattgcatttttgttcggctagatgtgtcaatttgtccaactacttagtcaaagcctttaatacgccttttttcgtttgcagggagtgag

SEQ ID NO: 13915 - DNA, 1219 bp, Mimulus guttatus
  Intron number 1 from transcript mgv1a015945m (locus mgv1a0 15945m.g) derived from phytozome v7.0 (chr-ID scaffold_121 ; pos 614854 to 616072 reverse strand)
tcgtcgataagctcgacgagaagtacctcgaagaggtgagcagttacagcatttatatatatatgcccccccctttttttttttctggtttttgatttgatttgaaggtttggtgaaattagggtttggttaaattagggtttggggaatttgtgaattttcattacagaaatttgatgatcatgtaatttaaatgctatttaatcaacataagaggaatacaagagttaaataacttattgattgacttgcattaggaattactaaagaattacgaaagggtaaattacggccacccctgggataaagaaaattacgaaaaaccccatcctgtttgagtatcgtaagatgtgtctcttggcttgtaaatatcagattgtggtgcatcaaaaactgtattttttttttgcacaaaacgcgtacaagctagagaatattccacggaatataaaagagattctgtttaatttggcaccgtaagggtggacgtataagaagattcatagttgaggggcgtggttgtaattatccaaacaggaggagtttttttcgtaatttgaccttacctcatggtttggtcgtaatttaccctttcataatgcatagcaaagcagcaatttccgagtggccgattagaaaattgtcccttttcttaaatcgataccgaaaagtaacttctgctaaatttactctgttgttgaagttattctaaagctaataatacatacattttcacacttcaaaacgccgtttattcgtgtggccttttgttttcgactaccttttcgtagtacttcgaaggagattttatttatgtatatttatatctttctataactcctatcctcagatttagatggcatgataaaatgaattacttcgcagctcgtcccacaaatgtcgattgtacacattttttttttttttcttgtcgcaaaagggttgtcgtaaatcttgtgatttcttttgttaagctgaaattaaatagagagatctttatattgcactttttgtagtataaattcactcgaaaaccaattctttgtactgtgtcaatacagagtaatattatggttcgttttcttttattcgaaatttcgaattataattctcatgaattgaaacttatttgattcatattccgagaaattttagttcacaatttcgtttgtgttatggtgtagcttgctgtggaccaagcaatattagaagcaaaaga

SEQ ID NO: 13916 - DNA, 719 bp, Mimulus guttatus
  Intron number 10 from transcript mgv1a002081m (locus mgv1a 002081m.g) derived from phytozome v7.0 (chr-ID scaffold_1; pos 1082863 to 1083581 reverse strand)
agagaaaaagcggctcaagatagtcagggtttcaggttggcttttatttgttatggtatcatcattttcttgtgggtacaacttgagctttcatatggttaacctctgttgcataaactattctatatttaactgcaagttcttttcactcaattaaccattttagttaagatgagctactatgtgagcagatttggaacctaaatgattctactctataagtggtcggagtcattttatagttcgtagataattaatcaatttaatgaagttgtacacttctgctacataacgaacttgaaagacctaatatgtatcctgtttccttatctatcgagagagggagcacggtagacgttggaccaagcacctcagggtagtagaacgatttgtaaatgttattatgatttggtagtacaacttttcctaatattttcttactccgagttccagtaattgttccacatattagctgatgggttacctcttgcataagtttttaatatcccatgaaatcaaaattttcactgtgtgggatgctaggtgtatctagtataaaccatgccttttttttttctttccttttttttcgaatatgaaaatttattcttgtaaatatgagtaatgcaaggaagcatcacacagaatcaacccaggccgtaatggttactgtctttgcttcaggaggagatctagctactgaagttagtgaggtttct

SEQ ID NO: 13917 - DNA, 1642 bp, Mimulus guttatus
  Intron number 8 from transcript mgv1a022325m (locus mgv1a0 22325m.g) derived from phytozome v7.0 (chr-ID scaffold_292 ; pos 14059 to 15700 reverse strand)
ctgcaaaggtagtcccaagatccatcatttttagagtaaattacaaccacctccctgaggtgaagtgtaattacaaaaaatcctctgtttgagaaattacatccaaccccctgcaatttgaaaatttcttacatttaccccctataaaagggtgttagcgtatgacatttacaaatttcaaggggatggatgtaattattggaaaatgagggttttttttataaatagaccttacttctggggcagttgtaatttacccttttttttttatatttccaattttttttttaaatccatttctccttcagaaagataaataagttggattttgacgacccttaaaaacgattaggaaaaaggtttgtattgcacatgttcttccgttgtacaactacagtggtccttcttctttgtaggtgaagtaaaaataggtgtttcagttttgcacaaaaataaacacaaattgtttcttactcgtatttctttttttacaaatacgttttttttcccttctgtctgaagcctttagattgtgctggtaaatgtgtggacgttgaaataaccgctacatgtattctactgtattcttcatggcttgccgatgtacactgagaaggtgaagattgcaagctatattatgtattgtttttgttctaatttaacgaacaaatgaacttcagttgctgtcaattgaccagagcttgactggaatggaaggattctgtggcacaaaagttgattgaattatatctacgcactgtgcctcgcaatgtagaacttattttatagatttatgattccatgttttttttccaagtacaaaatgattttacttcaacgggattagattttatgctcgactgttcaacagtatatattatatgcaacctgtcgttgacctactacttgtttactgtgccttacagatttacttactgcatttctaaataacctatattcttgagatcagcttcgaaatgattacaaagtccatatctctaataacacttgcctttgaggtacatgctttcatattcagaactttagtttgccttataatttacagaaaatttttgaattttccttatctttctatgtgctccgtgccctgttacatgacgggagtcgtaaattatttcattatgtattcttcacgaaaaaattcagtaaaatgcattcgactgttgttggttctgtctgaagccttttttttagccatttgtatgttttgtgcaaatcgcaaacattgtcccacaggcggctgtgttcagcctgcagagagtatacattactaattacacatggttattaattttagactaaagttgtggtattgaaaataaccaaatcaaacttatcttatgttttcctcagctaaggtttcttcttctttattgttgtgcacgtatctgtaacaaaaacaacttcaccaatttgcgccgtgagcaggttgccgcaattgaaattcgggctctttatcctccgccgtgacttcaccagagctccaccaacaaagaagaatgcaaagattcgatcggcgggaagtggtctgtatgtgccttaattctttcacatgtttttgctttaattgtttttcctcgtaatagagctcagtggtgatcttcgttctcgtcctcttctc

SEQ ID NO: 13918 - DNA, 1123 bp, Mimulus guttatus
  Intron number 1 from transcript mgv1a001719m (locus mgv1a0 01719m.g) derived from phytozome v7.0 (chr-ID scaffold_13; pos 1530629 to 1531751)
ctaacgtttacggtcgaggttcactaccaattttgtagaatgtactaccatgttttttgaaatactaaattctcaaagtttacgttcaactttcagaaatttatcgtcaatttttttaatttactaccatagtttaccatgcatttttgtttattcttctcaaattaaccagaaaaatactcgtattgtgagtgttcagagtgaaaaaagttgtattgaaattcaaatgatatttttttctgtcagatattacataagtttagtaggccttgttcggctgtaaaaataaaactatataagataagattaaataatctaataaatacccaattttttaaccgggacgttcaatataaaaactcattaaaaagcaacataaaacaataaatatttggatgattataaataaatttgagtcatttgtctttcaaatggaagccatcggcccacaagtaggagttgtagatcctattgggaggcccacgaagctcaagcccaatagggtatatgggccttaatattcagaaccagtaattcgattttattttttattttttatttttatctaaaaaaattagaaaattagcaatcgaatttaatttatgtaagaatcttcttattgaaactaatttagatttggttcagattttttttttttaaattaatttggttctccaattataattttataatttgatggacttattacagcctgcaacgaagtgcaaatatgccgaaatagaagggcatttaaacatataagaagattttaattggtttaatgaaaaaagaaaaagaaaaagaaaaaagaaaagggagaagagaagaagaaaaattaaagaatgcatcttctgtaaattcgtcgatgctccaaattccgaactgcttctttctctcagatctcctaaaccctccactggggctttgacttgacacaatttctcgcccccttttttccctagggtttcattttcagtttcagactaagcgaaatcttgggggtgtttaattcatgaaaacttggagttttctgtttctttattttcttgttttcacgttattatcgtgtttgattttcgattatggagtttctcaagcggaggaggagaaaaagaataaattt

SEQ ID NO: 13919 - DNA, 831 bp, Mimulus guttatus
  Intron number 1 from transcript mgv1a015751m (locus mgv1a0 15751m.g) derived from phytozome v7.0 (chr-ID scaffold_198 ; pos 224844 to 225674)
ggatttgcagaagggccctccgacattttgcaggggtgggatggccccccccccccccccccccccaatttttatttttattttttatatgataaaattgaaacccctttaatctgtgtgtggcaaaagaaaacaacttttgttagataattggttgaagatcttagctttttggttataaaaaaagtatattatgaagaagtgttatataaagatatgttttgtttcattttcttgatttgagggatttttgtagtttttttttgttttaagaccgcttgttcgtcttgtgtcgacatactactgaagaaatataaatatatagaatctgttgggaaaggaaatattaaatgcagatgaccgagtacaacacaagtagcacgatttcacagcaattaggaagtttaagttcgagctgtgtatcggcaattaggatgctttatagttctaattgattttcgatgtatttggattggatgcaatttattccgttcttttgtgttcttctaagatggaacgtagattaatatgttgtcgatgtttcaatattctgctagtccatcttataatccgatgtttcgtgtttgggcacttcgacaactattgcataatctttgtattaaaactttcgaattggtttgaaactatgaagtgattttgcatttactctgcacccttatacactgttttctgctattaagaacatgtttccttcgtgaattgatttctgtctatgatttatcttcttgctacaaagtacataattgtggatgcattcattaattaatctcgattatcttctaacaatatgtagggcccgtagccgaagac

SEQ ID NO: 13920 - DNA, 3202 bp, Mimulus guttatus
  Intron number 1 from transcript mgv1a004196m (locus mgv1a0 04196m.g) derived from phytozome v7.0 (chr-ID scaffold_8; pos 1982712 to 1985913)
atcagtggctatcccttcccgaaactaattctttggtaattattatttttctgcaattttttttcttcatgttacagcctggtgacgattgttcatgattggggttgcgtgtgtgtgtgtgtgtgcgtgtttgatttgttggttagattaggttactttactgcatcgggggtgattgataaatgtgtaagatggaggatattgtattacatgcaatcccattttcatacgttggtctacccgggtaagattgcgaacaagagaaaaatgaaatacagtagtgcggtttcttgttctgctctgatgcattttggaaaatataaattttcgttgtctgtgcattttctgaggatctctttttcccatagaattgaggtaactggacttgctgaatatgcggaaatgataaacatgtggcattctataagtgaagggaatagtgaaagtgggtatttgcactccattatgtaagaggtccgtgattccgcagttgagtcccttagctagattatgacgatggacaaaatattctgaagaatttaacttgtatgctgggtcaaaagagaagccgggacgtaacttactggtctacatggatttttaatttagattagaagtgatgacatgcagcatgtgcatcataagttggtcatagaactccatcgagattcaaattcaacactctggatcataataatctattgctagagttatttagtctggtctccaagcctagtgatccccgatactgattaaatgcgaggaaattctcgagataaacataagtttctaatttaactaagtccgacgtgccaaaatagcacaaacatttttttttggcagttagggagctaaaattgagtatcacaaataatatatctcggtgcatgagtatttattcagacatgtctctgtagctaggtgtaattggttgagattgccaaatagactttgaaggttcatgccttcttagactcactaaaagcttatcctacctttagtttcatagttgtatttgaccccatttcccgtaaaatggagcttaagcagaattgatgattgacacgtaagtgttttatgttttgcataactgccatattgattcaataattgtaagtttgttaagctgaattgtagagatggaataatgtaaattattaaaattgattatttacatcttggaacttgagagggtccagttgtaattttcgtccttttccttgctttgctccggaagatgaaactctcataagaaaacaaataaaaattataaattaaaagtatgcagttatatagtggtcaatgtcacaacctcccaaatggttacttgtagcctgcaggagatatattagtggttttatagtttcccaactgttttttttttgttggttttaagttaagttttatattcctttacttaccttttgtctaaatatttgaaaccacaaaactttcatgtactggcctgtgggactcatggtttaacttttgattccttatatttttccatcaattgaaaacttcaaaatggtgacagtgaaagttaatgtgtccccgggttctaaattattagtcttccccagattccagagatgtcaagggaacaccaaatataaaatttggctgtttacatatttgtgagactttggaatatccgtgttaggctgatttttcttttatacttttcttcttgtttctgaaagattccatttgcatgttgactaaaggttgtatttcgtgaggttgaatggtcgtccaagtggattaatacctggacaaaaacatcataattattgttgtccgctattcctattgtgatcaaggaattatggatatttgtgttaacgccagtagcacatccattgatgcatttgtttaaataggttgcttgttcgtagtagtgatgatcaaaattgccatgttattagattttaatcaatcttattagtcaccatatgatttcatttatactgttgcatcttttatcctattggatgctaacttttaactgaaacttaattagttgaaataaatggtttgcgttaagatctgattattgaataaggttccttaattgattattaaagctaatcttctcttctttacttaggccattacttacctttcttagtttcgccatttcttgtttacatactaggcaaccctactaaagcaagccgcagctttgtattccaaatacgattaaattcaatacattctgctttaaaagactgttatatggtaccccaaaaagtaacgttttaaaaaatacgtaaatattaacatttaaacgattggtctgattttgagctatgtaatcatttgcttctgctatatgtgttaatatatgcgttgtgatggctctcacaaggcagatatgtattagagttttcagagtataacaaaaagtggctgggaagggttaaaagttaaaaccactatacaagtggtagtctggtcgataatttcaaatacccgattccttttgtcataggaaaagaggataggaaagctcagcagaagcacttacttgaatcttccagtctaccattataaatgttatttttaatattttatagaaggttctacacttgtactcatttatttctctaactatcagcaaaagaggtatgctgagagtatggccatgaaaggtttgatctattctcctggttcctttttgtgctaaataaagggaggagccctgcttttctgtctttaggttgattatcccaccagagtccaaggaatgtaatattgggaagtttgcaggtcgctgttttgtgaatttgctttctgctcagggattttcctactattatgctgatctgttcataattttttttctagaatagcgggctattggaatctctcttttctgtagttctataagttagtccggtcataattcaaccagccattactttttgctgatgcagctggcacacctttacattctccaaatgttatataactgttttctgatataatttcacttacattcgcaaatctgtcataccaattgcaaaatctgcaatacagtttaatttagtactttgggcctttggaatttgaaaattgcgagtagaagcattttgctgatatgcaagctggtcctgtatatttacccttatagtcgaattggattaaatttatttacaaagatccacctctgaatttcaggtgaaatccttgcttaata

SEQ ID NO: 13921 - DNA, 1651 bp, Mimulus guttatus
  Intron number 1 from transcript mgv1a025835m (locus mgv1a0 25835m.g) derived from phytozome v7.0 (chr-ID scaffold_108 ; pos 677633 to 679283)
catcggagcttttccagaagcacttatacttcttggtaacaacttcctttctcattccgctttttgcctgatttggtttttttttttcatttgttttttttttctcagtttaaatgagctggcattgcttttcctttaagatggatttaattaaaataaagggtaaattacaaacaccccctgaggtatggtcaaattacaaaaaaacccctcttgtttggataattacatctacccccctcaactatgattttttcttacctttatggtgccaaattcaacatagtcatctagattctgtgaaatgtgctctagtttgtactctttttgtgtaaaaaatacagtttccgatgcaccacaaactgatatatacaagctaaaaatcacatattatggtcatcttgcttcataatgtagagtttgaatgggataaaacgggtacaaaagtgataatattccatataatctcgaagattccactaaatttgatgagttgaggggggtggttgtaattatccaaacaagaggggtgtttttgtaatttggtcatacctcaggggggtgtttgtaatttacccttaaaataaatcatttaacgaatcatattttagtattgactaaaataattgcacaatcaaatcatgtcatttgattgattagttggacagcgtttaattagttgtttaagtttgaataaagcatgcatatgcaaacctacctaaccatttttttaatatatttatttatttgattcactagctaaacttaatcgtatagtggattttttttttctcttttaaacacaatttggcaatttgccattatcacaattgacagcttcaccgggccccgcagttagatgttttttctgttaattttgaccatttttagattaatttaatttattttaggaattcagggaaaatgtgttgagaaaagtttattgaggtttaaaagtgtcttggtttacattgttcggagataattttttaagggtaaattatggctacccttatgtaaggtcaaattacgaaaaaaaattctcatgtctagtaattatgaatcttttcacacattcgctattatggtgacaaattcaacagaatcttctatatattatagaatgttctctagtttaatttgtctcattttgtgcaaatccagtttccaagcaccacaatctgataattacaagccaaagagacacatcttatgatcatcttgtttcaaaatgtggagctcgaatgagataaagtgaatacaaataagagaatattctaaataatctagaagattcgacaaaatttgacatctcaaataatgaacgtgtaaaaatatttatagttaatggatgattgtaataattgaaacacaagagatttataatttgaccttaattcagaggtgcatgtaatttacctttttttattcatgttatttatccatatcatattttttttatttaagtgccaaaaattaaattatattactaaaaaaaattatattatatattataaatagggttgagatataattataaattcaaaaggtacttatagactatagtcaatgttttcaaatatcatcctaaattattccctccatttaattgacagtatctggattgttgaacaacaaagaagtagctcaa

SEQ ID NO: 13922 - DNA, 666 bp, Mimulus guttatus
  Intron number 3 from transcript mgv1a016635m (locus mgv1a0 15461m.g) derived from phytozome v7.0 (chr-ID scaffold_8; pos 3392367 to 3393032 reverse strand)
tctacgttacatcaaaggaagtaagtatgcgttctttattcccatgtgatgttttccgacttcaaattatcttcacgttggctgtctcgtggtgtttttatattcacaaggaaaaaatcgagttcacttgactattgaggcaaattcatctttgtcaaaagaatgctcgtctttttcttgttacaccacttcttaattgaaaaatgtgaaatctaatttctcgaggcctcgttctgggatttggttaggtacttgatagacaatatagtcaatgtttggggttttggtttagaaagagcccgtattttaatcaaccatacgaaggatatttagtccaaactcaaccccactacacaattctacgaaggatacttgctcaatacaaggattgcatactcgtaaatctcaaacataagacagttacatattaattattctggaaattgtaatcctcaattccgaggcccgtattgttaattattgtcttccttttggaaaaatggatgttcggttcgaaagttaacgtttcctgatctttctattggtagaactttccccttgtgctatcttgctccactagtagaaaagctgtttttggaaagaaactcgaatgtctgatgcaatgaaacgataaccaatggttatttttttttcaggatcttgcaa

SEQ ID NO: 13923 - DNA, 1723 bp, Mimulus guttatus
  Intron number 1 from transcript mgv1a015879m (locus mgv1a0 15879m.g) derived from phytozome v7.0 (chr-ID scaffold_165 ; pos 309837 to 311559)
aatactccagttccaggtttctctctctaactctctctctctctctctctctctctctctctctctctctctctctctctaactctctctctctctctctctctctctctctctctctctctctctctcatatatatatatatgtatgatgcatcagattttgtttgtgttaatgatattttcatgggttcgtgtcgaactcatctctgtgtgatattacatacatgtattatatatgtatatataatatattatgtatgtatgtatgtttatatatgtatatatatgtgtgtgcagatggttgtgatattatgttgtagtaactttgatgatgatgatgatgatttttggtttagctggttatgaatttacagataatatatataatattaattaattaatcgtataggtgtcactttatttattttcatagttatctctttaagttaactatttgttttttataagttttattcccacttgggagttttgaattaaccctttgttacactgattttttgaattatgcatgatgaaaaaattgtgcaagtgaaattattataattatttttcaaatattagaatttatcatatgaccagtagttttagttttatgattttatgaaagtaattttagttttttgattttatgaaagtgggtgtttttatttttttaattttatgaaagttttcgaaactttttaaaaatgttcaaactcatgtgatttccgaaaatttcgaaaatttcattttagaattggaatgaatttctggatttcgaaaattttggaattggaattagttttgtatttctgaaaaaaatacacctataaataagttgtttgaagttttgttttaggattttgacattttgaattattgttagaagttttattgaatgttatgatatggtttatttttatttattattttgaactaaaatttagtagttattagttttacttttgtcgacgtggatgttcttatttttagaaaattatgaattgttcattaaattttggaaagttttgaaaatttaaatttatgcgatttctgatttttttccgaaattccgaaatttccgggccttttgaaattggaattgaaattgattttgtacttccgaaattttttggaaatttatcgaaaaggctaattccatccgactttcacacccctactttgaatgcaagattatattcaaatgcaatatttgcaattagtgtaaagttgaaaaccaaaattctgcaattttaattttgtgagaaaatatatataccctgcagacacacaacacaaaacattttttgattatattcattttaacaaagttattttaaaaagatgcctgcagtaaaaatcttgtaattaacttgattaaaataaaaacatctattattaactgatgaaattcttacttactgaaagaagattaaatatgtacgtatagcatgttatatagtatatattaaatatgttcaatattttttaagatggtttaaagatagtgaatctcgatcgtacacaccggacgagtaattagtcttactgaaatattaaatgtcgtttcaattttactaatacctgatgatatatgaattataatgtttcttttgttgattatattaagaccaccaatacataaatttgtttattagggtatatatataaatatataattatatataaataactctacatttctgaaaatggcaacagtgtg

SEQ ID NO: 13924 - DNA, 630 bp, Mimulus guttatus
  Intron number 1 from transcript mgv1a007522m (locus mgv1a0 07522m.g) derived from phytozome v7.0 (chr-ID scaffold_98; pos 1011197 to 1011826 reverse strand)
cccgggtcaaggtaatttcatctcgattttgatttttcagatgttaatttgatacattgatgaggttgatttcgtgtggtggagttaagaagggagtgcggtctttgtgtttgttgaaatgcttcagtgagattctggggaatattttttttagttgattccctaatattgcagtcttgattttttcagcttaaaagggatctaattggaagatcatctcttcttcttttgttaacctcctcgtactagttacgatcgtgggtttctgattttccggcaaattattgctagtagattagggtttttgtatgtggattatctgaatattagttcttgcatctaaattatccaattaggattaacgtagggcacacaaataatttgcgaacttttgggttatttaagcaatgtttggaagtgttttggggcgtatttccattttcgttttgggaaaagatattttcggaatataattcgagaatgaaaatagtgtttgttcatattcagtctttatttgggagatgtatggttagatgagtaattcctaccgataaatctttcaactaaagtatacatatacaatatgtatatacaggaaaggcttgacgagatagagagggaccagcgaga

SEQ ID NO: 13925 - DNA, 696 bp, Mimulus guttatus
  Intron number 3 from transcript mgv1a010275m (locus mgv1a0 10275m.g) derived from phytozome v7.0 (chr-ID scaffold_4; pos 2150586 to 2151281)
actccatcgtcatcaacatcggcgaccaacttgaggtaattaatcaaccaatttgcattcaactcccctgggtttactctattactaaaagaactcccagtgtttttaagtattataaaagtttgccctataattccatttttagtagctaataacctataaatgcatcatttagggtgtttttcactaaaaaaaggtattctatgggttttatgcaaatatttataatacatatttaattaacagtttgacgcaacaatgttgaattgggatataatttcaattataatacttagattaagctatttatttttcttggttttaaattaactgattgttttgatttttcctttgacaattttgctcctattacttcaatacctaacaataaattccaactacaacacatacatagatatatctatttatttttcttacttcaaattaactgcttactttgaattttcattttgacaattttgcacctcctactactacaactactaatatttcaaaattcaaacatcaattaattctcacaaacagagcaactagagaaattcggttggaagagtatttcagtcatattatttacttattttccctaaatatacattttaattggaagtggaaattcaggtaaaaattataaaccaagatttgatttatttttttcctgtgtgaaggtgataacaa

SEQ ID NO: 13926 - DNA, 978 bp, Mimulus guttatus
  Intron number 1 from transcript mgv1a016170m (locus mgv1a0 16170m.g) derived from phytozome v7.0 (chr-ID scaffold_291 ; pos 71587 to 72564)
aaccatccaccaatcttagttggtgccctggtaatacacttatcactccaccctataatcatatatatctctttgttcttgtttgtctgatattatattggtttttttttttttggtagattctgagttgttatattttctggaatttaattgttgtattaatcttttgtaatgggtttggttctttctcggtaaaatttaatagaaaaatatttttaaaaaaaaaagaatcttgagaattttgtggttgtgttcttgatttttattttttttcactaaggattagtttttttaatttttattgtttttttgacaaaattgtgttgtgggttttggatggaatataagtcttaatctgacatgattttcaattgaaaaaaaaaaaaaggaatcttgagaatttttgtggttgtgttcttgattttggttgcactaaggattagtttttatttatttattattatttatttgacaaaattgtgttgtgggttttgcatgggatgtaagtcctaatctgacatgatcttcaattgaaaaaataaaaacaaaaaaaataagtgggggataaaatatgattttaaattagtgggggatttaattttgaaaaaaattaattttgagaacatcaaatttgatttaatcatgatgcttaattgcttatagtagattttgttattctaattccaattttctcttgaatatagtgtgataatatgttcacttttatgcaatctaaacatcactaatgaagaaagacactagaaatagtttaatgtgaatcatttatcatcgttttcttgtctattttttttttggatttcgttatcggtcataaaaattaaattacattgaggggcttacacgaaatccaaactatttgagatactttcgactttttcgcaaattttctatttcgttgatgtcgtttttttttctacttaagattgtgtgagagctgagccagtgatatacaagaag

SEQ ID NO: 13927 - DNA, 988 bp, Mimulus guttatus
  Intron number 2 from transcript mgv1a014881m (locus mgv1a0 14881m.g) derived from phytozome v7.0 (chr-ID scaffold_7; pos 2035891 to 2036878)
ttccttgggagtaagtttatttatttattttttctaattaaatattacgtttttatttagttattctttattttttaattacccgatttacatcgtcttttaaatgataattaataaatatatatatattttctctctgtatatatttgcaaaattttttaattaactactaacaaattatcattttaaagaaagttagcattttgaatacaaagaataaaaataatatagtaattaattcactagtttaattttttgatatgttgtgagaaaagagaaagataacacatgatttagttaaataaatcctctctaaatgttggattggatcgacccgttcactatcggagctagtattttaagttccagagacccgaatacactaaaagtttaggagagggatgggagcgataatgttggaggggccatggccccctctgaccagatcgaccaattaaactataaaataaattcgaatatatacaaattaaaacgtgaaatttgttcatcattttttttattcattttttttctttcttatttttatttattcgtggccgacaaatgtgaaatttgttcatcattaatattgaattcacagacagaaaatatgagccaggccacgtttaattttccagagacaacctcatttccaccgaacacaatcatcaaattccccgaaatttatttaattttttttctatttttcttttcaattgcctcaaaacatatatgtaaataaacaatagttattttctaaagacttcctcgtttgcgccaatgttgtcagaatcaaatcaggtcgatgaatcggtcccatggtgacccaattgttaaaaaacaaattgaacaaataaaatcatgttcaattcgatgaaatcggattttacataataaaaatggattttttatttttagctttcttatattttaatatttaattttattatctttacctaattaatatgttgttttgcttacgtgtagg

SEQ ID NO: 13928 - DNA, 1636 bp, Mimulus guttatus
  Intron number 10 from transcript mgv1a010725m (locus mgv1a 010725m.g) derived from phytozome v7.0 (chr-ID scaffold_15 ; pos 369260 to 370895)
aggtggatcaggctacgctttttgatttgatattggtatatctcccctctctctccgtattcactttgcctattttgtccctagggttttaatgatttttccattttttctgtgtgttttaatcttatcgttttccctctctatattccttcacacctttgtctacactgattgttctgttgtatggaattgtggatatcctcattttggaattatctagtttttgatttattttttgttgttattgcttgtttgtcatttattctgcatgctagtatgtgtacggatgctaggggtagataacaaacctaattaccccatgtaacagttaaattctacctacttttttccagtcaataatgttctatgcttggcttgttaattatggaagtataaatgtgtagaaagatcaaactattagagtttgtttggttcacggttattaatcatggtcgagctcaattttggaatcgcgaaaaatttcgagcatgcttggtcattgagttcacttgattggtttgtcatttttgcaccaacaccaatgttgaggaaacttagtatttccaggaactctgaggttttctgtagttgtatgaggatttttgggcgtctgctgtctttctttgcttctctatattgtttttgtctgggcttgtatgcttctagttatattattttgatgttgttttcaaattttagcagtatagaatggaggtagtctccctctgcttttcaaacgttctagtttccaatttactctttgttcggcttgctcgtacttgtgcgacttgttatggattctgcatgtttctaagtatgctcatgttgggctgactgacaaacttaattacccaatctaagagattaagtctgcttatattttttcagtagttaagattgtatgattggtgagtataaatgtgttggaaaatcaaacaacttgagttgatttggtttacgattgaagtagttcagacaacctggaacattcagatgctttgcttgacttgattagtttgtgaacctacacctgtgccaaatggaattaattctttacgggcacaattcatgtcttcaatgttgatagctggatatattctgcagttatacgagttttttgtaccattcctgttcttctctagtcttatatgatgctagctttgtttctcaaggttcttatgttggataaattataaattacattttgatattcatgttttcattagcagaaggaaatttgtttgtcgtatggcttttgttcgattaacttttcctctcataatggtgatgcttattagtctctagttccaatagggaaattttgctacttaagaagatcctagcaaaactaagggctcacaggtttcatgcaagtgtttctgtttactcctttgaacatgagttatctgcaccatatcaatacatcttattatatcgtgttttcttgttctgcattataacaaatcttctttatgcattttctttgcatcttttttttatgaaaatgtaaggtttccccaagttattatttacgttaatagttctaaatttgtaatgctgttttcatccgatggggcttctaattatgtttttattttcaggctgcaaactatctgaacatcagaagcttgctcga

SEQ ID NO: 13929 - DNA, 1504 bp, Mimulus guttatus
  Intron number 1 from transcript mgv1a007466m (locus mgv1a0 07466m.g) derived from phytozome v7.0 (chr-ID scaffold_172 ; pos 505317 to 506820 reverse strand)
tcacccctgattttcagctccactgggttaagcaggtaccttaattcctttgtgtgtgtgtgtgtgtgtgtgtgagagagagtagaaacagcaaagagttgaaattaattgtgctgttacatattctgggaatttgaaagttgaaaattcggtaattttgtgactgatttggtactatgtatttataattttaagcaactagaattgaaattgtgcctcaactaatatatacaatagaaattgtgactgactcggtccccactcggtgaaaacgtgttaaattattaactcgataatttattaattcgctaaattaatagaattttcctagtcccaactgtattaatttatagtggttgaattgtatatcgatgtgggatcacttgaaattagtagttcaaaggacgaattggagaattgtttaggaatcgggattcgaatgccacgagcttcgcgttgatctaagtatgcgatgcttgttcgtctttcctgcaaaaacacttaggccccatttggttggcaagataagattagccaagataaaattaaataatctaatgtgacccaattattttattggagattgaaacgtccaacaaaaaaacctcattagaaggcaagataacccaagataagccatgattatataattttagcaggtcgactcaccaatttattgaggacaccaaacatcaaattaagtccaactatttagttaatcatggcttatcttggcaaccaaacggggccttaacacactatgtgacacgtcaggggattccccggcgattacgctccgacgctgaagtcagagatgatgtcgcgtgttgataattaactcaatactacaatcatgtactttcaaatgttgattatgctaaagattaaatagatgaaagctcaaaagagctttttactattaaatgaatatgggatgggatcaattcttgtttatttatctcatcccgtttttattgttccgtaaatttcttttataggaatgttcaaacatttttttatgtttaattaatcaatgccatcaacctatgttttgaatctgagtgaaaaaatgaggaataaggtttcgatttaaatggtttgtgctctttcatcttgtttattgaaaatgtggattaaattatatttcgtaaaagaatgtcgaactcatggagaagtttataaaatatgtaggaacactaatatctaaaacatatgggatattcctcgttgcagaaatgagttatctgcttcgatataaaaaaaaaaaaagcaacaaaaatcgatgaattcatcgtactatgagatgtatcgtattgttaactctgaatatcattcagtcgctttaaaaaaaaactcgtcgtactaaaattgaggcttaaagagttatactagtttatttagtcaaactcgggtttaacagaggttttatattattgcatcaaaattaattcagagacgaaatttcatttactcgactgattgatttttctgtagacaggagctt

SEQ ID NO: 13930 - DNA, 310 bp, Mimulus guttatus
  Intron number 3 from transcript mgv1a002491m (locus mgv1a0 02491m.g) derived from phytozome v7.0 (chr-ID scaffold_54; pos 1366939 to 1367248 reverse strand)
ttgcaaagatcaaagtagtggtacgtttattctgcctttttcatgttattattttgataacttcattgcatgccttttctaactaaccgactgttgttagcaataataataatagttcattggtagtttgagaaatatatgtagagtgtaatgatgtgcagcgagtgaagaaattattccttccccaaccatctgttgcatctactagattaaccagtttatatgtactttgttattttcctttcgatttgctgatgattaatttttttttgcaggtgcggaaaagaccactaaacaaaaaggaactgac

SEQ ID NO: 13931 - DNA, 585 bp, Mimulus guttatus
  Intron number 3 from transcript mgv1a009544m (locus mgv1a0 09544m.g) derived from phytozome v7.0 (chr-ID scaffold_7; pos 2989376 to 2989960 reverse strand)
ggggtaaactttgatctcttaactttccaatcttaatgagttttcttgcctacatttcaactccgctcgatttattggcttcatactgattttaaaagtagcctcagttttacttttaattgataatcatttcacctagaaaaggaaaaaggttttctagttagaaacacaaggcttgttcacaattttggctctgcatacgagttctgattggttaagagacgtattcctgcttcaagaattgagataataataagcagaattaaccaaatgacattgacatgcgtatttttcaaatgacaaaagaaacagattctgctgatgtttgagattgtgcaataattaactcgtattttgtggagtactttagtagttctgaagtaaatgtgtggaattagttcgtcggcttttgtatgaacataattttgaatatgcggttagttaaaatagtatttactgcccaagtttattaggaaccttgttattttttttatggctgttgcaatttcttattaacaatttaacatcatgaaatcattactctctgcaggtgaagaagtttccaaattttgtgcgaagtttctt

SEQ ID NO: 13932 - DNA, 464 bp, Mimulus guttatus
  Intron number 5 from transcript mgv1a001642m (locus mgv1a0 01642m.g) derived from phytozome v7.0 (chr-ID scaffold_30; pos 1154791 to 1155254 reverse strand)
ctcaagtagtattgaataaagaagctgtttacaaggttgaatactttatttatttatttattaatttttttttacggaaaatcaatattttttattgggcatactatgccaagttaacacgaagagattcaccttccagttacaaggttgattactggactcacatgaccaacttactttgaccttaacagaatagcagaaagacactcaaaatgtcgagcacttaatttgtattttgtctaatcctgaatattttgttgaaaatgattattgaagcaattgtgcatactttgtcaaaacgattattggaaacaattgtgttgtttctgatttgtttatgcatagtaaaggcaactatggaaaacatattatttttgttattgtagatgtttatagctcagtatctaaaatataagtttgctgatgtaggcaacccataaaggcacatcagcaagcaaaaagaa

SEQ ID NO: 13933 - DNA, 449 bp, Mimulus guttatus
  Intron number 7 from transcript mgv1a004069m (locus mgv1a0 04069m.g) derived from phytozome v7.0 (chr-ID scaffold_27; pos 250778 to 251226)
tgataggtggtgatagtgactttttcgcgaatctggtaagttgaggaatcaatgaaccatgaatctacaactgccatggatgtataattgattaaattagcagattgaattttactccaatgcatagcattttaatgattcattttttcttgtagttttatagtattttaaaatgcctattggaaaatactgagcatagccttccatcagctttttgccttgaagaaaacttatcttgctatttttgttgtaaattttgtgatctacaatgaatcttttctgacttatgtcacttctctgtctctggttaataacaatccggggttatgcctattctgtatgattttttattttattttttatgtacccttgttggaattgatcttattatctgaaatctcttaattatattaatcttttaggtcgtggaagctgtacaagcaataaag

SEQ ID NO: 13934 - DNA, 1593 bp, Mimulus guttatus
  Intron number 1 from transcript mgv1a020688m (locus mgv1a0 20688m.g) derived from phytozome v7.0 (chr-ID scaffold_177 ; pos 239208 to 240800)
cagcgagtctgcagtcttttcggtaattaacataggtgaggatcaacagagccttggaaatgaaatccttacaattcgaatattcaacaagaaaaaggagctaacgagtgaagagttgaaggaaaaattccaggccttcacagatgaagtgagagagcgtcatttccctcaatgagtgaagaaacatgcatgcttctttcgtgttgctcgagaccgggttgaggctgggagattgagattgtaaattgtaatattattatggagattttaattttattctgtaaagatgattgtgaatttgtttacactggtttttgtagtttgttaatttacatgtattgatcgatcacttacagatgttttcttggctgatcttcataatattagtctaaataaatttgttgcgtctacttagattgaaatatttgctattatcttttatttgtagggctgttttctagaactgtattttacttacatattgcagtaaggtttcaagaatgatataatgatgcaaattggtatttggttgaaaatgttgtccaaaaatacatcacattattttgtgtatgaggagttttattgttattttcatcaattaagaggatgttagttgtgatcttttgaatgtttgactgtactatgcatgtggtacaaattattttgattgtctacaatctacatcaccctccgttgattatatctttttgtttctattggttcctttagtagttttttttttaccgtcaaattaatgggttcaaattatgggcatagccagcacatgattcataaaaatatcaatttgtgttctaaaaaaaatataattgtacttatgttcaatgttgtcagaaccggactggacataaaaccggatggacattcgagtcacggttggaccggttcaaccgggttcgacccgggttttttattttttatttaatttaattttacgggaaaaggtaagagtttaatgaaagctttgggtcggaagtcgaacaatccgtatgatccggatcgtattggagatcgggaagttcttgcatccgatcgtagaaggaaagcgacggcaagagaagaagcaaagagagcgagggaagaagctactgcagtcggagtcgggccttctaatgttcttcaagttggtcaattcgtactcagttgcagtatgtgtccgatgatgacgaggagatggtggctaataatgacggcgatgatgacgaggagatacacacatatatctaatgtatgtcaagtaccaatacttgtcatcatcaaccaatttactcttgtactaatctcaatactcaatactgactaataaaagtttaggagtcacaaataaaatgccaaatcaaatatccatagctaaaaaataaaatacaacgcaataaaatctacgaatttgatacttcggctctagtggtggtacgctcgaccacaccttctcccattcctacttgtaaaatttcaatatgagagagacaagtatagttacaatttcaaagaaaagtgaattttcaagagtggactgttcttagagctatgggtatataagtttatccacaagattcaagagtggtccaaaagatt

SEQ ID NO: 13935 - DNA, 650 bp, Mimulus guttatus
  Intron number 1 from transcript mgv1a018900m (locus mgv1a0 18900m.g) derived from phytozome v7.0 (chr-ID scaffold_209 ; pos 256889 to 257538)
caatctttaccaggccaatcctcagacactgggaggtttgtttctcttttagtctttagggtttttttttctagggtttttcaactgtttttcgtagtatccgtcggtgtgacgaaacgcagaatcgatatatattcttggtatatttaacacgtgctgaaatgttcttactgtttcctttttttttaagttgaaaattaagatttttttttttttttgtggattctacatgatgtgttactatggtttcacgcgtgtgtaaaaatagagtccgatttatcgttgaagatgaagattcaacacgtgttgaaatttatatatatatatttttttttatgtttttttggttgagattttagattttagattcaacaaatttgaattttttttttaaattgagatttaaaaatacagtaaatatatcattgaagatttaacatgtgttgacttattattttttttaattattattttgtattatttggttgagattttagattctgtgggtattgaggtcattcattcacataatatctgaaatattcttgaagaatttaacttaacacatgcaaatataattatatctatttttttcccctctttttattttttttatttttggatagctatctatcctaaacttggagaaa

SEQ ID NO: 13936 - DNA, 655 bp, Mimulus guttatus
  Intron number 3 from transcript mgv1a015436m (locus mgv1a0 15436m.g) derived from phytozome v7.0 (chr-ID scaffold_204 ; pos 102201 to 102855)
ctaaattaaggaacggattaactggaatctctaaggtatattccactacatattttttaatgattcgttttgaagccaacaatatgagacgaacttatatattatttacgttgttatcgtttttcagctgtttatgttcagttacagacggaagtggatcatatttatccacttcaaggccgtaatttgaatcccattatttcgttctcttatcaaattctaagaatatcaaaagaattcctttgagtagtcttggtatcgacaaaaatcgaagactttttttaaataagtacacttctattcaaattattagcatgctcgagatattaaatgttaaattttctgcatcaaaacattgcatgttcataaacttcagcaaacgaacacacattttttcatcgttttctatttatttttatttagtttttgtgatggatacgtgacttgtagttgacttatctatatgcttcttgatctcggaactgaactccagcaaaaaaaccctttgcccgtctttggatgtgcaattagtagaattcgatataagattaagctatttaatttattattttccgcttatcatttaacgaagattttatgaattattaattataatgcaggcagaggaaaagcacttcgaaattcttggccgact

SEQ ID NO: 13937 - DNA, 1998 bp, Mimulus guttatus
  Intron number 7 from transcript mgv1a000780m (locus mgv1a0 00780m.g) derived from phytozome v7.0 (chr-ID scaffold_124 ; pos 748787 to 750784)
attggaccatccattaacgtgagagccaataaaaagtgagtgtcttttacataatatttcatttttgttaattaatttgtcatttagtcctttctttcttatgtacgtgaataatgggaatatttgattgcttgaaaccatttgattgagtatgtgctgacaacatggtgtcatttctctgagcaatatatttctactttccaaatgaagcagattttcattcgtgttccttttggacatgttattggttcgtacatgtttgattgccatcctgcgtatacaaagttgtttgctaagataattaattgtctggatagtttatttgccaagtttccttatcgcaattaatgatgtatgagttatccgtgatgtcgccaatgcaaattcaaatatgagagtttgaaaattccattgttccccttaccatgccactatttaacaagtgggatttttcttgtggtattgctccatgatgaattggttctgttgtattctactgatttttctctcttatactgcttgtgatagagataatccattttagtggttaagaagttgaagggcaagaatcatgtagatatgagtaactttccatgcagaacccaacatgaggaagacaaggagcacattgcactatcattgaacttttttagccatctattattatgagagccattaaggttctgatggatgacctcctctaactacctagtacatagaggcttcattttgagaaaatatgctgattggttatgaaaagatgcttcctcctaaaggaataatggataagtggattaaaacagatgaatatagttgatcacctgagggtgtaatcaggaagaagaaaaagtttcaagagtttctctattaagaaggaactatgtttattttatatatagtttctctcatagtcgaacaaagctctaacacacgaacacagcctactgaagatatattttttgaactttcattctcatagaatttcttcgaaagtaacggctacggggtatgagttatgactaatgttttttttaatggggcatgatgccatgattttattctttttacaatttttaaatatacctttatattttttacaatttacaaatatgcccctaaaattgtaatatttacgcgtatgcggatcctagttttttggaaatgccgtatttgtgtccgcatttccgtgtccgtgctacatagggttacacattcacatttatccttttcgggcattgaaatatattcgatccagattcatgactacaaggaaatcagggatctttattatactttttgtctcttctttccctttgtgggtgtgagtgtgggtttgggtgttggtgtgggtgtgggtggggttgccatgggcggcattcctcgtttatattacaactccctcagaagagcacattggcctgatctttgaacttgtctacacctgatcattgacatatcccattcgtcacaggattgtattggggaagattccgacatctgatggtccaacaaatgcttatactgtttttcgtggcaggtgggttggtaagtttatgcatgtagggatgctaataattgtttttggggtgttgtgcttggcaatggagtcatccagcattgtcttagataagattctaaactgaattctcaagaacgtaaatgtataaacaactatggttatatttttatattttatttttgtagcatgaagtttaccttttcatggggtttgctaatgtaggctgctttaatcaatctttctgtatcgtgacttgcccttttcggtttagttagctatcttgtggcttttagctgcttactctatgcatttcgaattttcgtgttgattgagatacactcttctgttcttcatgtgtatgcatttgctgatatattctggattcctgtatccttgcaaatttgtttagattatgagcagtctaatatatatacactatcttttcaggagtttgtctagtggccaacgaggggaggtgt

SEQ ID NO: 13938 - DNA, 1159 bp, Mimulus guttatus
  Intron number 1 from transcript mgv1a006057m (locus mgv1a0 06057m.g) derived from phytozome v7.0 (chr-ID scaffold_101 ; pos 57473 to 58631 reverse strand)
tctctctctctcttccggctcccagaaaaaataaggtaactcatcgattgcgattttcttgtttcctgtttctctattcatttacgaaaattcaaataataataataataatatcaacacaaaatccccaaagatttaattttgaattttgatttatgtttttctagcatattcattttctgggctcccagcaatagtgtataaatctcttgattgacatccatttcttggttcttgattatacacacacacacacacacacatgtgtgtgtgtgtgtgtgtgtgtgtgtgttctgagcaattatgagaagcttgattttctggaataattagttctagaaaatgaaaattgcttagtttgcttgtttataaatgttatataaataattagaagtaatgcctaacttatgtgtaagtttcctattgtgtaagaagaataaattcttgtgggtattttttggatcaagcgagttcgtatattcgattttcaagttcgatcttgtcgagtaagttcgacatagttcgataagacttttgtctagcaagatgcagtaagattgcaatcttatggattatattggatccgattaatagttagttagttgataaatttcgaaaggtttgatatgaaactaagaaaagaagataaattttacgatcaccccctaccttgttaaatctttgtagaatcttaacccgagcaaaatccgtcgagtttcggagtaaaatccttaatgtctttaaattctacgattttaatgatcatagtgaagcccgaccatttgcaagatatttacgatcctacgattttacgatcagattttaccataattaatgtgtgtaggtaagttaatatgttaattgtcacttaaatcgattttttttctctctctaccaggtgtcgtgtgtttctggagaaccgactctttggcgctgtgccgaggcttattcagttgccgaaaaaatacttttcagcattttcttcgtcggtcttcaaaaaagacaaaccaagaaatgctgaaaaaaaatgttcacgaatcgaaattctcgttctccgattcgcctcttcgcctcttcgcctcgataaacgaggatcgaatatttaaagctcctccgtcagttattgtatattaaaaaaaggatctttacaccttccaat

SEQ ID NO: 13939 - DNA, 2057 bp, Mimulus guttatus
  Intron number 4 from transcript mgv1a004990m (locus mgv1a0 04990m.g) derived from phytozome v7.0 (chr-ID scaffold_262 ; pos 37385 to 39441 reverse strand)
ccggtgttcttggcggtccaaggtactattttttcacctatatttaaatttttgtagaacttgtttgggtgaatttattttactagcatttttaatttatagctctcgtttttaggttttcttttttttttaatcattgcattagggttttagatcaaaatttgaattgaaaaaggtgaaattattaacccaaaaaaaaatcaattttttttttcaaatgggatggaaccattgtctcataatatggcaaagaatattaaaaaattaaaaatagtatttatttatttgataatggataatgtgggacgtccaaggttatatttgggtgtttagtgtgtaaatcttgaaaatagtaataatattctattcttgatagttgatgctttacagccaaatgtgggccccttttagcccactagtttggtcattttcttggcccacttgacaacaagtttgtcccaatgggaaaaaaggaaaaagcttaacaatttggattgtggcttatatgctggctctcttatattcttggtgttataatgacccttttaaccctcttatttaaagtgttatttcctctaatttctctcaattaattatttgttttgtttgtgagaatcattgtttgaaataatttaggagtaacaatggtaaaattgaaaatcagtaatcgataatgcatcattgaaactgtaaagtgcagaatgcagataatatagaactataaattttatccataacgacaatcatttcaggataaaatgatcgtcctagccctctttcttatcgaatctttctaagccttgttcgtttgaattgtgaagttattatatagtttgaaataatatacgagtaacaacggtaaattgaaaatgaataatcaatgatgcactattgaatttctaaagtgacagataatataaaactgtaaatttcatctagaacgacaattatttcaggttaaaatgaccgtgttagccctctttaattgaatccttgtatgcttgttaatttgaattgtggagttatgatatagcaataatgatgtttgaggggtcacatcaaattcgaaaaacacacacaactatatgtgtgtttgtagtccatagagattaaaaaatgtttctttgccaaaaaaaaaaaattaaagaaattacataaaaactaaaatttgattgatgatgtaagagaaattttgtccgaggaactattttgcacatgcattttcccatgtatggatcccacttgatgttcattgttctttctaaagttattccaatcttaatgtctttttcaaattaaatggggcaacctcatttgtgcatggacttttgcaaccattgataaagtttctttctagtgtcatcaacatgtgatacagtttattttatgttacactcgttgaacttatcgtaaatcgtattacacgttttttaactctttatttcccgcgaaatcgtataggtaaaaatacatttttcgtttctcaagtttacctcgattttatatttggtccacgtattagatttagcccctcatgttaaaatagttgaatacttgtggtcattttcgtcaatttaccgccggtctgttagttaagacaatgatggtcatgcttgattctgttactactgctaactgaaacttgacggaaatgaccaaaagagttcaattgttgaaacgtgatggactaaatctgcttttcgtgaacgttaggagaccaaatgtgcaatcgaagtaaatttgagggatgaaaatttaattttccccactcgtatatctatagataaaacaaaaattagggtttcaactcaactaccacaaggccataaatatttgcctattttcattcatttttcgtctcgcatttcatttcatatacgtgatacatttaactatacggagtttattgcattatgtatcatgtgttatatcgaattgctgtaaaatctcccctatttttaacactagtaaaattataaatgaatatttgaactaaagagttttttttttatttttttatttaatataatgtagggacaatagtgttagcatatcat

SEQ ID NO: 13940 - DNA, 880 bp, Mimulus guttatus
  Intron number 1 from transcript mgv1a004901m (locus mgv1a0 04908m.g) derived from phytozome v7.0 (chr-ID scaffold_76; pos 768450 to 769329)
cacagcttcatcgtcgttgaattctacgctccttggtatatatacatatatgtttatatctatttatatatctgttgtcgcatgaattggctgtttaaattgaattgatttgatttgatttacaattttcttgtggtgtgggttctagatcgggtttttaagtatgtgtaatcacagagattggaaaaatagcattttgtttgtgcatttttcgtttgttccttatgcattaaatgttatacatagcccatccattgttgtaccttccttgtttggcgtttttctctgctggcactattctctcaatttgaaactgcaatttttttatacatgaatatatataaacaaaaattaattaattttttttaatgttttttatgtcttatcttttgagaaatataaaagttttttttgggtgccttagagaacaaaaactatattgatatcatcaatcaaaatgttgtttcatctctttcttcttgtatttcccccaattccccgcgtagcgaatcgactctcttgatgtgtgtttgccctaacatatgtgtggattttgtgtgatgatgatcgttgtttacaatgtgaaggcttatgtttacatttcaagtaaattttatgttttttcttccccattgacttttacgcctgtacgaagaataccaatttttcttatgtatgaaattgtgctgaaaattgccctaaatgcatttgttgttagtgctgttactactaaaggcattcagatcagcaatgaattctttatatttggcatcattttctatttatttcagaaatctctgttcttatgtgaagaaatcatttttattttttcattcttgtaacaggtgtggacactgtaaggctctagctccggaggtaa

SEQ ID NO: 13941 - DNA, 1579 bp, Mimulus guttatus
  Intron number 1 from transcript mgv1a010409m (locus mgv1a0 10409m.g) derived from phytozome v7.0 (chr-ID scaffold_41; pos 1463656 to 1465234)
cagtgcaagccattgccggagtctgaggtttttattccttctattttttctcttaattttctgtttttgtaagatttattcggtttagtatttacagatctggtcaatttgtcatgtttagggatatatgcgattgttgtattatcagtatattgttattttcatgattttttggaggttttcgttttgccaacatagagattgaggaagatgagaaattaaaatcgtgggagggaaatatagattttatttacctagaaaaaaaaaaggattttgctacatttgtgaatttgacgattggtgattttatggttattaaagtaaattttgaggtgtgttagtgtagaggaatgttagttgatgagataattgttaaccttgcaagaaaaccagtttgtatagcaagatagatggaaatagaacatcaactttcaagttctatgtgtgtgtgtgtgtgtgtgtgtgtgtgtgtgtgtgtgtgtgtgctttggcttgaaatatttcctagtagttactagtcagtactttctaataaataggtatcagttgaagatctatatattattgatgtatatccactacagttgtacatattattcacgtgtgtgtaaccttcctgaaaacacaacctatattgaccaaaaagtatttcatagatgggaagaaccagctgcgagacttgtctcgctaagctatatgaaaatagttcttaactcccttatgaatctgtccgctctaggtatataatatgaagagaaccttatcccatatggaactgtatttgaagaatgatattcaatgtgacaaaatgaattttaacttgatttgattattggcataatagggattgatttgaataaatagtgtgtctctcatttcttaccaatgctaaacaaattgttccagagaattggtagatgagcagaaagaagtagctggttgttcttaccaccacattctaaaggggattggtgtgtggatcccctttattcacagaagtcacttgtattggccaatacaataactcttctaagttgtatctatttagcctcgtttgacagtctcaaccaagtctgtaatatagcgatacttttttgggccagtccatcagttttactctctccgtactaattatattaggctaaagttggtaaatcagtaggcttcgacaagtttcttggaaatgaagcatctgatgtatccatgacttgctttgtcaaaatggtaaatggatggtggaagagatgatttctaacttattctttttattttgtgcgttctgattgtttttactcaatccattcgtatctgctcatttgctccaccaaacactgtgtggttaacattagcagctttgtcaacttacttgtagcttaattgaggattgctatgacactgtaccttgctatagctgatcgattcaccttcttgtcagatctatatttgtgttttatgtgttttaacttcagtgtcttctcatgtatattatctctgaggtgaaatggaattgctgattgagattgtcgatcattgtgtaaatgtaggttaggactttgtgcgagaaggctaaagaaatact

SEQ ID NO: 13942 - DNA, 1681 bp, Mimulus guttatus
  Intron number 2 from transcript mgv1a009197m (locus mgv1a0 09197m.g) derived from phytozome v7.0 (chr-ID scaffold_158 ; pos 133912 to 135592 reverse strand)
tagctacgccaatattgcacattcaaaactctaaggtataatttttatacatcttcagagcaactccaatgataggtattaaaatgaggcatctaaacccttaattgatgcttgaaataatactttggtatttcgaaaaaacttatatgctccaacccgtaggaatcaaataaattattctatttttaaatatgtattaaacataaattaatagatatatttggtccctattccataggaatttgttagaaattatattctttttagagcaactccaatggtaaagtattaaaatcgatcatcaaatattaatttgatactcgttttattattttgatactcatttattccaaccgcaagcattaaatgaatcatctaattttaaatataagcataaatatatttaatattgacacatgtcaattttttattggtttgttgggtagttaatgttttgatacctctttttccaggatgcatttttgcatctcgggaagttgaatatcaaaataactaccaatttaattcccccattggagatgaaattttatgttttggagcatcaaaatagaagttattccatttaattccccatttaattcctccactggagttgctcttacgttgaaattgcagttcctaatttctagaaatatttgatacttggtttttttgggagcatttttgcacctctgggagataaagtaatcaaaaaaactacccctttgatgcttccgttggagaagaaattttaagttttgggaatcaaaatggaagttttatcgtataatactccatttgattctcccattggagttgctctcagggaccagttctgaggggaagcgaagttacgcggtcgcctaaagcccccggatttttacgaaaatttagagcccccaaattattttatatattaatacttattttttaaaatttattatatatatataatattttggaacatcagttctaaaattaatttaaaataaatgatcaatagatatttttacaattgtcttaattattatttttatacctaaagtaacaatcaatattcattagtgtatttaagttttataaatatttataaagtgtatatgctataaggattatacgtcatgggaggaagtgaaccagcaaatcatcctcttaattttgatttttttccatatttaaagttaatttatattcatacatttcaaaaaatgtttcgggggcactgcccccgaacccccgtaatcttttattctatcatttttagaaaatattatttatatattttagtatattaaattccgaacaccctttaataaaaagtgatttatcaaataggggtccccgttttaacgtgttctttaaatctcgcatagggcccccaaattctcaagaacgcccatgtatatctttcgtttccaatttctctctctctctctctctctctctctctctctctctctctctctcactctctctctctctctctctctcacacacacacacatacccgccttgataaatgaataacttctcttaacgtgctaaattataaattcgaaaatttaatattctgctaaattaataggattttgttagttctaactatattaatttatacagtttttttaactgcatatattattatttttacagtacaaggatacatcggaagcagctatag

SEQ ID NO: 13943 - DNA, 460 bp, Mimulus guttatus
  Intron number 3 from transcript mgv1a006086m (locus mgv1a0 06086m.g) derived from phytozome v7.0 (chr-ID scaffold_2; pos 1041948 to 1042407)
ccttcgttgctggtaggaattgcgattactgtctctgaacatcattgtgtcactcttatatacgtttaacctatatagtatgttaaagtcttaaatccggtattgcctaaattgtgttgcataaaagaaaatcttacatttagcctctaaatttaaaagatgaaattcggacaataaaccactttaaagacgcttcagtattgctctatgactcaattctttgatagtgaaccgtaccaattatcaaacaaagcagcagttatgccatctggttctagttgtttctccaccgtatcatgatgagttgttaacttgacatttttaggaccaatattagctagaaaatgttaaaatcataagaagacttttctgaaatttctctctgtagttcctcttactaaagcaactggctgttcctgatcatacatcttatgtttgaactttattaaggtacgtgagt

SEQ ID NO: 13944 - DNA, 2576 bp, Mimulus guttatus
  Intron number 2 from transcript mgv1a001761m (locus mgv1a0 01761m.g) derived from phytozome v7.0 (chr-ID scaffold_36; pos 407543 to 410118 reverse strand)
tcaaaatcttcattcttttcacattcttcactcaggtaatttatttattactaattcaattttttttttttttttactttactttgattacctcggtttataatttagtttccgccttttattttggtctcgtatacaccacgtgaaatacatccggaccatataatagtatggtgtaacatttatgagaccataataaaaggcggaaactaaattataaaccgaggtaattatatatatatatatatatatatatatatatatatatatatatatatatatatatatatatatatatatgtgtgtgtgtgtgtgtgtgtgtttctgcatgtctaatttaatcagagctgtctaattaatttccaagaaaaaacattcaatgctaacatgcttcatgaactggatgatgcttttttgtgtggatttgaaatcaatagtttctactttccataatatatataaaaatatgatctttaatttattttttatattgttttaaatcttgaaaaaattaagaaaggaagaggtcaaagtaatatatataattagggctgtgcacggatcggttttaaccaccaaccaacccattttcgacccacaatttgtgatggttaatcaaccatcaaccgacccatttaagttgggtcgataatgtcaaccaacccatgtatagttgggtcgataatggtttctaatatgctaaaaagttggttagtcggttaatatcggccaaccaactttattcattcgtttattatttattaattttaattaaaatatttaacattattaatttcaaatttctattttatatcacatttattaagttgtttaatattgaccaaaatcctaaaagcaataaatctaacctaagtatctaatttgaactattttaattttaagacatatagtctaaatatttggacgattattatttgttgaggtatttatttttaattgcaatatatatgcccgtaatgttttggattttttatttaaatattattgaactagtcccatttaatttataaaagatatagcgttgtaacaagtgataaaatatttaaaaaaaattaaaaaatatttagatggatgacccatcaaccaaaccaccaaccaacccattaaattggttttcaaccattacccaacccatgtaaattgggtcgataacggtttccaatatttaccaaagttggttggatgggttgagttggttttatggctggtttttaaccaaaccaaccaacgcacaaccctatatataattcactgaaataaaactcaaatatatttaattccttgaaataaaatctcgtaaagtaatttccaaattcttggatattaaatgtggttgaaaaagaaaaaaaaaagtgtctttaaatattgattttatgttataattagattgccagctagcacaaataaataatgtttgaagaaataatattttcattttaaacttagggttttgtcatatattattatctcatgtgaatatatcttagttacaaattatttgtgactttagaatactaattaattgcagttttctcaatttcgccattttattcactcttaatctaaaactagttgaaacaaaattagtacaaaaaaaaatatgaaaaatctatattagtcacattctatgtttcgtttttctatatttattagcttttttaatacgagagcgacaaatatttcagcaccgataagagtcgcatatcgcatatcggacaaaactagtaacaactggccaatccatccaaattaatcttattataaattccgaaaaccctacaatttatttaattttattattttttatttactgagcttaattaattaaatatatatatacatatatattcattatttgtgtgacaatgtatatacctaagttggtgtggtccggcagaactaaccaaattgaatgcaggcaagttgacagtagtgaagcacaacttgagactctatttgagctgccttaccctactttgtatttaagaacctaacttttatatactttttttattttcactcttttaattacacatgtgcatggtccaatatacgaatcatttcgatacaacgaacacttcgaaaatatctggtgatgtatgtacgctatctgtgcatacaatggtcgttatttaacgcaagttacgtaaaatatttgacgtaaatgtaaaatatatcctaagtcactaagaaaaaataaattttacgggcgaatgttgtactcggtttagtatctacgaaacatatacgtttcacccgagaaaattcaatgtttaaaattatattttttttattccgttagaattactcgaatatcttctttttttttttttgtgttcttatatcttatcactgttttcataagatttttttttgtttattaatatctatatatttctttaacatattcatatagatttactatatattataatttatttatgagaatctccagatataatttaattttacaaataacaagttattttcatatttgatatatatagttagatttatatatataaattattccatttaatttgcatgacaggtgg

SEQ ID NO: 13945 - DNA, 1171 bp, Mimulus guttatus
  Intron number 6 from transcript mgv1a002305m (locus mgv1a0 02305m.g) derived from phytozome v7.0 (chr-ID scaffold_83; pos 686923 to 688093)
gtgtcaagtccctcatattcactaaaggagaaacagtgagtaaaatttactaaccttctattcataattcaatatttcaatctggtcacctctgtgtttgattagcctaattaatagttagaataaaaaataatttaaatatatacttagtattaatatacgtgtctgttgcttatcttggagtcatagcggttccaagatttcacgggcctaggcaaaatttaaaaattatataaaactacattgacaaataaataaatgatggaaataaataaatgatgggtaagatgaattgaattagtatacgaatcaaatcatgtgtttacgataaaagatagagaaatcatgtgatgatcataacacaaaattctctaattcatcttctataacttcattattaatcaaaatcataacttcattattaatcagaacttgaaggaattaatagttgaataaatttctgtttaattttcctttcaaaaaattagtaatttagatctttcttagcaatctattccttcaaccccgaccggccgaaaaccaagcctcaaatattacaattaagccacacttgtgtccgctcacgttccaagtataatgctatagaacaacaatttgtagctcataatttcagtttcaactcggaagtgaaaaagaaagaaatcatcttattcgaacacaataggatgcatgatttgttgataggctatactaaacaacaaatccgacataatatatcgaagtaaaagagtgtttagtgtctacaaatattggttggttggttttacaaatgaaatcttactcctatttatacttttctaagagagaattgatttagtgactatgtagagcaatatataaacgttctaagtactttatagtaactaactagaataaagatgtttttaggaaatttgtagaaatctatagaatttggttacaatttccaacaaatttctagaaaattcctatctacaagttgcctactttgcgaaaatatcatatttttttggttcaaaacagacagacgaaccgttacacctcagtctcatacacattcatattatttattctctgttattatatattatttttacaaacatgttattcattaaaataaaaaaattcttaaaaaaaaaagataacaagagaaggcgatccggtgcaaaga

SEQ ID NO: 13946 - DNA, 759 bp, Mimulus guttatus
  Intron number 12 from transcript mgv1a001797m (locus mgv1a 001797m.g) derived from phytozome v7.0 (chr-ID scaffold_48 ; pos 207271 to 208029)
ttgttctttcactacaggtaccacacttgtttaaagaatagcttattttctttgaaatacgctgagtaacattcgaaatattattctgtggatttgggcagatgatatatgtgggacaatgtggactatatgctaatctgcaatatggtgtgattatggattataacactacatttaaattttaaaaacttaagactgatggacattttcatgcttaacttaatattagttgactcggattggtccgagctatcgaaactctataagggtggaaagttaaattattagaccttcaggtgttttgaaaactactcctttgtttaaactcaaccgcaaatactactgtaactgataccatctaaaatatgttttatcttcccgcactttgaactgttggtcaacttgaaaactcgagtgaggtaattcgatcagttgattgttaataaaattaatgcttctgctgtgacatctgtacaattttggtagttattgaaacttttcaaatttggcaatctaaataatctacaaagttccataaaaccaagttatggtcagagtagtgaaacaacaacaaattaatatttcagtgtggatctcgatatgccttcttcaggttcacatgcattctgattgtctattcgtccttcgtgactgcattttaagtataacatctaataaatattcatatagttaacatttcgccaatctgagaatattcatggcacattttgcagaacgcagaaggaggctttgcaacgt

SEQ ID NO: 13947 - DNA, 828 bp, Mimulus guttatus
  Intron number 1 from transcript mgv1a015378m (locus mgv1a0 15378m.g) derived from phytozome v7.0 (chr-ID scaffold_66; pos 66457 to 67284)
gtggttacattgtcatcaaggcccgcccctgcaaggtttgattcgttctctctctctctctctctctctcctttttgtacgtttttttgtcgcattttatttttctagatttgaattcacacctggtggttttaggtatactatgagatctgagtaaataagctgatatcttcagttgctagacgcagttaattttgttgatcagtttttctaattcagaaatgaattcctttatcttccgtaattattcaattgtttacaggttttgtatacgtatagtcgatcgagttgattggcttttttagcttgatttcatctttccttgtattttttctctgtgtagatatatgatctggtgtagcatgtatctgaatgtttttattgacaaaaattatcaacaattggcatcctgtattactgttttgttagcttagattgtaatatcgatatttgcacataatcgatttctctgttgttagtgggttattttggtagatatggatgcacaatttaatccatgggcccgggagaggttttgtagaatcttctggtgaaaaatgttgtataattctctcaagtaggactcatttgctcgaaaccatatatgaaaaggccttctgtatataaattgatgttgatgaaaagttgataacgaagaaaatgagaaaatcatagttctttataaatgcgggtttaatttaactttatgaatagatttgctggcaattattctttagaatcacgtctctacatcatgtctatgtgatactaaatatgcctatgtttgttacaggttgttgaagtttcgacctccaaaactggaaagca

SEQ ID NO: 13948 - DNA, 1035 bp, Mimulus guttatus
  Intron number 1 from transcript mgv1a019626m (locus mgv1a0 19626m.g) derived from phytozome v7.0 (chr-ID scaffold_48; pos 1392734 to 1393768 reverse strand)
cagtttgctgataaaggttcgatcttttttttttttcgtcgaatttattttgattttcgagcatcttttgttgttgctgatttttttgatgtgaattgaagagggttttatatgcttttgtgtgtgtgtgtgtgtgtgtgtgtgtgtgtgtgtgtgtgtgtgttctttgttgtggttagtgatgagcaaatgtggaatcgcggaatttggtttccgccgctttccgatccgaaaagttctgattttggaacaatttttttcattccgacttccgaaattccactttccgaatttttccaatttttttggattggaattggaattatataaaataaattcggaatttccgatttccgatccgatttaattccaaaaaatacaccgataaataatttatattatataatacttattttccgaaaaatacacctataagttctgttttaggattttgacagaatgaatttttgttagaagttttatcggatattatactctgtttatttttatttacttttttgaactgaaatttagtagttattaggtttacctttattgatgtggatgttcttatttttgtaaaattatgaacatcatagaaaatttcggctaagttttgaaattttaaagcttatgtgatttccgtttttttccgaaattccgaaatttccgggccttttggaattggaatgaatttttagattccgaaaattttggaattggaattgaaattgattttctacttccgaatttttttggaatttttccggaaaggctaattccgatccgatcaatccgactttcacccctacccccaccccccgagttcagacggtatatcttgtaagtgttgtaaacatagtccctctgtatctcataatcttgtcgtattattgaatcagtgctcattatctcggcctatttttgtttaattctatatattcgaaacttgaaatagatgattaacatatcgtattttccccatattttttgcattaacgtacgagttttatttggcgtctgcaggtattgacg

SEQ ID NO: 13949 - DNA, 1009 bp, Mimulus guttatus
  Intron number 1 from transcript mgv1a019796m (locus mgv1a0 19796m.g) derived from phytozome v7.0 (chr-ID scaffold_1; pos 1732245 to 1733253 reverse strand)
aaggtatgcgtcttttttttttagggctttgattttcaatgcagttcatgatgatggagcagtgtgttaattttgtgcatttttcattttgattcttctgctaatcgtttgggcgattgtttcttctgtggtttgatttcaacttttgttggtgaaaaaaaaaatggcggcgatttgagtttgtttacgcgaactcttcgtttgaatttgtgcacacgtcacacagtagattcatctagaacattggtatgggaaaactgctttcatgggagagggaactgcttttgcattgttcatttttgcagatggcaaaagcaatctctgtaattagggtatattttttactgtggttaatcgtgtttgtgaactagcttactgatcgactgatgtaaaaaatccggataaattgctgaatgtgtatcttgattaaactgttatctgtatcttttcctagtagcttccccatttatttttggattgttaacgaaaaacataagatcttacaatctagatggaagcatcagtaaacggataatgtgtctcgatctgagttttatgtacggttcagttagttgcttagtgtaaagtgcaacaaccttatcgtgtttacagacttcaaatgtatatacagaatggtacgaaagagtgaacctgaaaaaccgaagataatctttgttacatgacattaagagtataaaacattcatgtatatactttaagttgtgatatctacttcatgtatggagattcattttgttaaaattatacgacatgattttgttcgtgcagctgtgtcaactttatacatttttttcaaaatgcctgttattgaaacgattggctgttgttgcagattctgtgtgcacaatcaagataacatttatcatttcaataaaacggcagtaaatatgcttttgcagaatcagccattgatttgttttccccagtttatccgatcatcttattacttgctacctttttctttcagtgcctaacgacgaacaatcac

SEQ ID NO: 13950 - DNA, 2953 bp, Mimulus guttatus
  Intron number 1 from transcript mgv1a004394m (locus mgv1a0 04394m.g) derived from phytozome v7.0 (chr-ID scaffold_76; pos 689365 to 692317)
tcaacttctactacacccagaatttccaacacaaggttagtttttctgctatttttcctttttctttattaaattaaattaaattaaattgcactcatttttgtaattaacttaatgtaaagttattaattttaatacatgtggtaattttgaattttcattcattatttgagcagcataaatcattaattggatttatgtacggtaatttgaaactacatatgctttgtggagtgattaaataagccgagctcgccagatttttcgaaaaatttaattttattgcattatgatagaacacataatatttaatgaagccattttaaaagtgtcggtaaaagctcaaacttttagtgaactgaatcatttaaccgccctcaatttttttactgttaccaatatatatatatatatatactccctatgttccataatatctgtctttattgagaatttttttgttccatattatctgtcacttcacaattccaatgctgcattaattgcttatttttcaattttacccttattaactttatagcactcttcctgcattaattaataaataagggtattttggtccatcaatatctattttcctaaaatcaagacatatttattgagattcttaagatttgtgccaaggtgaaaaacgacacctatttaggaacggagggagtatgtactaagacttgttttacataccgcctaacttttttcgagacttagtgacgctttggagtatggaccaccacttcatatactaggatgttcattttctaagagcacttgtctcttttaattagttttcttacaattagtaagggcggccgaatgcgcattaaaaataacgtaaaagataataataacaataattgttccaacagtggcgagtctatggtgagtctaggatactgttacatgatagagttaaaattcgggcattcggtttccctcgaaaaaaaaaggtttttttttttgacaaaaccagacataggaaaagaaaaacctaagattttttttttcttctattaatttggattttaggtagacttaataaatatataggtgtaacatagtaaaattttaggtttttcttttcctacgtctggttttgtcaattggtaacttccttatgctacttgttaaactcatttattattgttatttattttttatataaaattaaaatattaaaaattataggagcataatacaaaaataataaattatatatacatatattgtagtgaaaaaaattagtaaaatttaagggggggcatggcccctcgtggtcctcaccaaaagaatagtagattaattgaccgtccgtgaaaatcccaccagagagccttctactatcaactagatccgaatcattctcccaccaaaaaaataaataaacataataataataataatatttttttttttgaaacagtatatatatatatatatatatatatatatggtagaaatagagatgatttagaaataactccaagtaggacctacatttttccatttaattgttttcttgaagtgacatattttgtatgaagacaataaagatccaacctttcacacttgctgagccctatctatatacaatgtattagtttcaagaatggagtatgtgaatttactaaaaagcccctgagaggctgcttaaaaagtaagatgtcttgttatatgtgattaatatatagccacaaattgatatatgattagttgtctggttttggagtattctggaaataaatggcctacctagctgaattgatgttgctttgaatcatcaagaaagttaaataacctatatttgtctgttaatagacatatgggtaatagatgtaataatacatttttatatttaatcaattaaaaagtaaatgaaaaaagaaaatgacaagtggtgtgttgtcataggttggcatggctggtcaaaataatcatcctcaaagtcttgctaaattattcctagtccctttcacagttattacaaaatttgtatataagggttttttttttttttttgcaaaaactaccccgggtgtaatctctaattccgaaaaacactcactgtgttagtaaaaaatagtcaaagccaaataaacccctaatagcttattgtgtaatctctgaaattctttttggttccttcttgttccttttttgatatttctttggtaagggtaatttggtcatttcaaaaaagtcaacaataaattttgaaatacggaccggtgtgctttaaaaaacacaacatgaggggatttcttgctaatgtttttaacacaaggggtttttcgagaattaaaaactcacggaggtctgtgctattagctcaatatatatactggtagaacatttggagaaacagtgaaattatatatatatatatatatatatatatatatatatatatatatatatatattgcactgacagttaaaagttaaaaagcaattttttttttaatttgtagaaaagaaaaaatgttcggatttctatcttgatgtaggaagcaaatggttgatgacttgatgtacaatgttacagtctaaatgtaaagtgtttacatagttaaaagcatatgcaatttagattcgacttctattttcgttctcgttagtgattagttttaattaatactgtttcaagaacaccccacatcgatcattatttcctcgaaagattctgaatattacagaacacaaaaaaataatattttttccttgctctaaatacaactactcagaatgtttgtatgaattttataaactcgagttgtattttctttagacacgttgcaccttgtgcatgagatgcttgtacacgataacttgaaatccaccattcgaacaaatttttggttacaaaaattcgtcagaaaaaaaaaattccgttattgttatttaacgttatactatatccaatattattgatgcag

SEQ ID NO: 13951 - DNA, 532 bp, Mimulus guttatus
  Intron number 1 from transcript mgv1a015468m (locus mgv1a0 15468m.g) derived from phytozome v7.0 (chr-ID scaffold_17; pos 1828218 to 1828749 reverse strand)
accgacggctgcattcgagtaatttttctctcccccttttcttcaatttctttttgaacaagttatgttgcgttcttatttctccgatttattttgctggatacatatttccgtttggggatttgagtacttggtgagattaaatattttgattgattgaatctgctgtataactaatatcactctgtgaaaaatgcgtgcgatgtgtcgatgatgggcactcataatagcaaaaattcaataggttaggttatgtacaagaagataagtgagtagtctaagattagaaatgacttaattcacagacggaaagtaggggggcggcgatattacaaatgagatttggttattagatactcgtaggtcatgtttgctgagttttcgaacataaaacaatggagtgaatccgatgttgtgacaattttgccttaacctaatatttagtttgcaattatgatgtcattcatcagcatgttagcagtattttactagtattcttcgaactcaatgctttacttatgctatacagaga

SEQ ID NO: 13952 - DNA, 2284 bp, Mimulus guttatus
  Intron number 3 from transcript mgv11b014887m (locus mgv11 b014887m.g) derived from phytozome v7.0 (chr-ID scaffold_1 41; pos 184650 to 186933)
agatactatttggcacataactcggattgtgcacggtaagtttagctacaatgcgatattcaaaaagtttctttggatgaatttgtttactgcggagtggctatttgctactatgcagcagtcaattttttttttctacttccatgtgttttgtgacaagttgtgagttctgaattttctgaatttggttatccgatcatgagttatttgaaaggggtctaagttattctatgtatatcattgtaacaagtaggctaatccttaaaaaatcacaaaaagatgaaagtattatagaagtttgctaaaagcctacaaataacaaggaacaatatatgcaagggatcattaaaatggaaatctcataaagtagcaaagatgttgatatatactataaatcccgtcctacatctattatgtgtgggaacatctctcacgggcttcctactattactagaaaccaagaactttcatggatttttgggtgggtctgtggtggacctgatgctcaatgggtcgctggattggcaaaacataccaagtgaaaagccgatgatgttatattgtgattgtcgtattgtatactcaggttgtcagccgtcagtggaccaatgaaactattggactgggttgagagacattttcaaatgttgatgtcttctaattgttgaggttatcttatattgcaatgaattattgatattttgggggaatacaaatagctttactggagaaaagaaattatgcttggttgaaccaatcagaaacgctcaactattagcaatttattggcaatgattcgcacttaataattagtgaatatgatttctcaatttaaaaagagctagtatacggtttattagtagaacatgtggagttcggacttattatgattaggtgttctttctagattacaaacttgcaggtttataatggttcgatgattgtttgttattgtgtagtctttcatcaattggtgatgcaggttaagatcttccatggaaagctatcttgatgcctttgatccagtgaagtctgtatcacctgctggaatttttactaacagggtcgaggtcagttgtgattaacaaactttactacttggtccggagtttatatgtgaaagctattattttttaataattatgatatttagtcagagaccctttatataagccttttgaccttaatgtctgatgattttagcctatgctttggttccattatataaactttccataatgaaaatgttatttgtgaagcaaactatgtttgtaaaaccttttctcaatagagaatattatgacatatttcttgtattgttgaactaaacgaaatctgcccctgatgttggttctttttacaaaaaaatcctgttaagttagttaatagcaaatactactttgacatgtttctaggccaattgcaaactatcataaaaaaaaaaaacaaacttcagaggtatttgtaataactggaaaggtgtttgtactttcgatagttgactatatggttttgtcatttggcaaacttcaatggtagtttctgtaatttgcctagtagataatatcatgttaatcaaggaagctttaactacctgaaaggggggagtgggcggaccaattttcatattttcgttatttgattgtttttttcattttgattataagtttataactattataagttctgatttgaagtacttctctatgtggggcacggcatgaacgtagttttggcgtaagaattatcattgtagaacatgtcaatttaattaaaaagatagatgtctgcgatatttatctgcgaaattaggatgctctagacatggaagattttgctagtaaataagattttgttgtatcatctatgcatgaggccatatccacacagaaaattcctcttacccacaattttctttctgaaggcaagagctgattaattactgggtacttcttttcctatttgttctgtcagtttgttcattgcaaccattataacttcatgtccgtttttatgctttcctatttgagttgttcccttttggagttagaagatgattttttatattcatgcaaaaagtttactgatctacgaactaattctgtttattgtttctaatttctaaactgaaactttgtttgaaatgtaggaggttgaatttgaatgtgttccaactacacttatggatcgagtcattaattttctcaatgtaagttgctagctattttgttttaccctttttcatgtagggtttgttcttatacgaaactcttacaggatacta

SEQ ID NO: 13953 - DNA, 487 bp, Mimulus guttatus
  Intron number 1 from transcript mgv1a015907m (locus mgv1a0 15907m.g) derived from phytozome v7.0 (chr-ID scaffold_7; pos 2862570 to 2863056)
tgcttctccacctctctccactctgtaaatcaaaggttcttcttcttcctctttctgttgtaatttgattatatgctttttccgcatcaatttttttttttggttaaatcgtttctgtagtaactgaatttatatcggaatgcagtgtttgtatgaacataatcgatgaatttttcattttgatcttgggatttgttatgttgaatatgtggttttagaatttatttatttatttttaatctgatttttaatagcatttcataagttttgttcatctactgtggaattatttaccagcattttcctgatatcggttcatgattttactctgttaaaagaatattcttttggtatttattatttgaatgctgcactattaattctgaaaatttgctgctttaattatgtttccagacgaactgatttgctttatgtcatttgttttatggcagatttcaatcgaagaacctcgttaatccgaacgcaa

SEQ ID NO: 13954 - DNA, 2099 bp, Mimulus guttatus
  Intron number 4 from transcript mgv1a013067m (locus mgv1a0 13067m.g) derived from phytozome v7.0 (chr-ID scaffold_130 ; pos 578539 to 580637 reverse strand)
atagtgaatctggctctgaacttcgtcagtgaagggtaagtctactataactagtttaccgattagcagttactaaatcgtagtgattcttttgatgcaaagatcgagtatttcagcattaaaagactcaataagatcaacacgtggcatgatttcaaagactatacttgaaattaagattactgtgagaatttacttcgattttttttgtgtgccagctgtcacctgttttatctgcattcattatggaatgtgaatattgatgtttttggattggcttataattgcaggatctatagaggattagcatgctcaccttatggtatattagtatctggcggttgatgtgctgttcgtcgaatgtttttgtttttgatctgaagttgcactagagatatcttgtggatgcctttttccatattggatattcttctgcctgttcactctgattccccataggatgccggtgattaggcagaagaatctttgtgaatattttgccaagatagtcttcgactcttcattccttcctgcaaaaaccatttgcctcttacatttacgcctttcagttttcatcctaccattgcacatcacccactaaaagacacccacccctgtttcctcgtcttacctataattattgcacttgcagaaagagagagggtccctaattgatttcttgattttgaaagtgaacttggcactttcctgccggtcctcttgtactcgagtcttgagctacaatatcaacctgtttggactaatcgtccaggaaaatcattcacaagtttcaaattttcttttcttttgatcatgttcgatttgtttcgtttatttttgggtggggtatgggagtgtgggggtgtagagggatttccatgtctttgttgagttggaaaaaaaacatctgcggagttagaaatgacggggaataatgaaaaccgttataaaaaaggcgaatgtgctcttttctacatgcatacatgaaggaacatcacccttcgtattcctttttccttacgttttggtctattcttcttgacactcaatgcttataccttttaattcttctcagaataggtggaattatgtggtcaaattatgttgtagctaggtgcagaatgtagaatgttctatactgtattgaaaaacattaattttcttaacatacctcattaaaaaagaactttcttaacacgaatatatataatttttttccttgtagcgacatgctaacttaataataattcgtacttgcacctgtatttagaacattgtctaagatggacccaattgccattttccccctcccgtgttttgtatgcattagttgttttctaactaaggaagtaagaagtaaaagagtactatttttgcattgtttcagttccttctacaaatatacttttccattttgaaaatttgacataccgttcacctcaaatgacgtatctctacgtttttcattgcttgtcagagtgttgtacataaatattttactttactaagtctaattaatgaattgatacatggtgtcccgggtgaatgatatgctggcatttttccagtcgagtaagtatggaggcatgtatattgtgagaatttcactttaaaattttggggagatatgaacattgattggggatatttaagtcaacatggtgttgttgtactatgggcaacagaagttggacttgaagttgatatttctgttgaggggtgtgacgtatatttttatatcgatcaaagttctgcagaagaatcttggaatttttttctccatcttggttgctgctttattagtttggtaagggaaaattgctttgatttttgtgtatatttattcttcgcgcataactatttcatgataatacataatacattcaatcgaccttacgaccgcatcggtacaattcttagtgtttcttcaaatgggtttggatctacttatctcgtatttgtttctatctgtgtcctgattacattttcatagtgttaattttgaaatcaagattccgatttttcgttttttttcttttaataattattattttctttttgcaggcttagaagttcactgtggcttcagttcagacctc

SEQ ID NO: 13955 - DNA, 717 bp, Mimulus guttatus
  Intron number 1 from transcript mgv1a003707m (locus mgv1a0 03282m.g) derived from phytozome v7.0 (chr-ID scaffold_15; pos 1031051 to 1031767 reverse strand)
ccgttgagaaggtataatttatcgcctgcattgctctctctctctctctctctctctctctctctctctctctctctctctctctctctccgtgtgtgtgcgtgtgttgtaatttgttgttttattcggtggttttacctacactgaagcaaatctacattttatcataagcatgatgtgctatgcaatggcaattgaaatcagcttggcaatcattttctctgtgttatgttttgaatcatatctttcgattgtgaataattcatcaataggttacctttctccatgtacatcaatgttaattagcatagttatgaattaaaaaaggtacgatttagaggtaatgtgaaggtctatcaataggtagtatattattttgataataatatccacaataactgtcatcacaaatataagttcttacattatcatcgttgacaattattgaatcatctctacaaagaacccaatcacaaacatttttgtaagtatacgtcgtgtatgataagtttgctatctgtgacataaatatgctgagagacactgatcattgatgtagtatccgtgtgatatacataggccatcttgagtacatgtttttcatttccagtttcgtatttgtatagttattccgataccaacttctgtatattctgtttatctgaaaattgattttttattgactgtagggcttgaaaactgcaatcatagaaggag

SEQ ID NO: 13956 - DNA, 2832 bp, Mimulus guttatus
  Intron number 2 from transcript mgv1a021534m (locus mgv1a0 21534m.g) derived from phytozome v7.0 (chr-ID scaffold_74; pos 1100360 to 1103191 reverse strand)
ctcgatcattcatcgccctcatcgtcgtcgaaaacgtatcctaattattatttattaatatttctttcttttctttttatatatatatatctattaatcaattggcaaatggaaaaatattaaaattgttacttgaccacactttgtgaataaaatagtgatgttggtgagaaatatggagaggatagtaattgcatgggtgaaaattcaattggtgattctgtactcctcgccacacaatcatggaactcaggttactagcctagctacatattatatatcctctatactttaattaattgttgaacctaataataattaattagatgatcgaggagttgtttttattatataatattttttaatgatggattaattaatgtacttaacagaaaatttcacggacaagaagaagaagaagaaggaggaggaggagaaaaagaaaaatgatgttgattccaacgtcgaagctggatacatgttttcgatatttgggaagtaaaaataaatattcatcacacatttgttttgttctctattaataatttgccctggatgctctagctaagctactatctttcttaataaatattttcttatattattgtatattgcatatgcagtatatgtttttactgctaccaatactgaatgttcatcattattattattacatacgattactaattaattatatacagttggactctttttaaatatggagtatatattgacctttttaaatattgaggccctacaaaactaatattgtgcaattggccatcttactttttggatgtttccaattgttagcatttcaaacttaagacaaatatattgttttttttttttttttttttcaccatctgatttttccactgtacaggatttttctttcacaagtatttgatttatttttattatttttgcgaatttccttacaaaatatttttctctaaactcctgtaaaccctagcttgtaggttcacccattagactcttctgccccaaccgaaaaaatagttccaccaaatttatttatgttaattaaaattcactcaaactctcacacataagatatcaaaacttcaattagtaacacattagataagtcgttaatcataatttaatttgactaattgttccatgattttgggatataatatattaaaaggaaatcaatgaagagtttaagattttgactttcataaatattttccagttaacatttaattttcgtctaatatagaaaatcaatataatattttaaaaatcttaatttacaatattaatttgaataatatctataagtatgaaacgaataatatgatctaaaaatattgcgacccacctaactacaccccaaatctcgaatacaatcttcttataatattatctctaaatattcaaaattattatcattgaatgatgattctaatctttaatattcttgatttagattagaggcataatcttgcatttagtaatgaagatcatatatacaatatgttaatatttaggaaatattctttttttcttttcaaacacatgtactcagcgaatatcatttcaattatgaaacaaatatttaaatatcatatataccggagctgccaaaaataagtaatataagttcatatatatataaatattcatttgtgtaggtacgatctttaagtaaggtaaagttatatttaattgagccgtgattttggtaacaaatatttatacgtgaatttagcgtatgatgactacatataacggacataattgaccattgcttttggtaataaatctttgattaaaatatatatatgtattgctatttttcaagatttttaattacttaattatccttaatatcacgttgaagtataataaattaaagagaaacaagctaaaagaaaatcttctaatataagacattaccttttaaatgtttaatgtaatatgatcaaaacccccgtcactatgcttttttttagcatataatccggtcagtagtgagtcattatggggtaatttgttataaaaagttgaaaggtaggggatgtttgcgaataaaataatattgagggtttttcataacaattagaagaagaagaggattttggtgtatttaaatagcctcttcccttacctcccacactgcacaaaagtaatacaatgtctttctggagtaaggaacttctaattaattgttctctgatctatttcatataaaattaaatgatcttttatttatttattctatttttcattttgttttgaataatattaatttgaatgcaggtgttgaagtgaaaagaggaatttctgaatattataggtgtgttcctggagacggtaaaacaggtctccgactcacacaggtaattaattaattaaatttaattccgtagcttgtaacaagtacgctttagtatatataattgatgaatgaatgaatgaatgaatgaaataggcgacactggggaaaggcagctcgaaagataacagttatgtagagtgctatgtggacggatcgaagacgccaatctctatttgttcattgataccaaataagaccgaaacccaaattttggatctcatatttagcaataaacaagatgttaaattctgtgtagttggacctcgaagtgtgtttttacttggacaccatctctacgatcgttcgtcgtctcgtcaaactgacgactcgtatcctttttcctcctttttcttttctttcttttacgtactattaattgttattttcctcgtcaaaattatcagtcgtccttgacttaaggggcaacagagaaccactaggatttaacatagagtatagtg

SEQ ID NO: 13957 - DNA, 1290 bp, Mimulus guttatus
  Intron number 1 from transcript mgv1a013764m (locus mgv1a0 13764m.g) derived from phytozome v7.0 (chr-ID scaffold_12; pos 794830 to 796119)
tgtatgttttcttttcttttcttttctttttttttgtttttttctttttttggttatttgttttaatttaaattttcttatacctatgtatatttagtagggaaattacagttttcatcgctcaagtttgtactgatttcatatttggtttttcatgttcataaaaaacacatttggtccattatgttctaataatttaacatttttgatcattttcgttaatttactgtccgttagtattaatggaaaattaacgaaaatgttgaattttaaaaatataagggaccaaatgtcgtttttttaacctggtgaccaaatgggaaatcggtgcaaatttgagggaccaaaactgtatttttccttatacttttaggatttttaacttttgaatgtgaaaattgttttcattggtattttgtttgattcggatggttacaaattttgcaattcgtgaagttattgtttcctattctttactgttgaatcttgtttcaatagtagttcttatttcccaatttttagtaataaataggatataaaagaaaatatatatttatagtataaggttgggatattaatcgttattaaccaaataattggattctgtttgatatttggtattctagtaatttgctgggtcgatccgcaaatattatttgccttgtaggtagtctttttattggttgtcccggtgaccaataaaataattaagttttccttagattatttaatcttattttggcaaccaaacgagaccttagtgtattacgattaaaaaatgtgatctatccaatgtcgaaattgccccgatatcattgacgagtgattggagaacaattggtgatgttattaaaatgtttcagagatgttgcatcgaacaaaatatattagattagacgatgtttcaccattaatttacgtatcttcacatacatatatttcgatgtatttaacaatttagcgaatatatgtaatgttggtagatatatattactcggtaaacttcacctagtgagcacaagattaaatcgttatagaaattagaattgttgctagcaaatttatatgtagtgggtgcagatgcctaatttttttttttttttttttccgatgataagttgtgaactaaagtcgggattcgaacaaccaactgaacaaattaaatatcgagttgaactggaacccaattaaacttattttctattaaataaattgggtaatgtatattattggcttgtatctgactctattgtcatcccctaacatttttattaatcaggcactataata

SEQ ID NO: 13958 - DNA, 685 bp, Mimulus guttatus
  Intron number 1 from transcript mgv1a009204m (locus mgv1a0 09204m.g) derived from phytozome v7.0 (chr-ID scaffold_8; pos 160737 to 161421)
gctgaaaaccccatttctggttcggttttttttttttttttttcatatttttgctttctgcttatttgatttgtttgatgcagttcagtttggattgtgtgtatgtgtgtgtgtgtgtgtgtagtttattatatgagatgggatttgattgaagatcgggtttggttatattctaatgactgttttgaatgtttatacacgcgtttgattttgtgtggttttgattcagaatatggggtttctttgatttggatttcatgattgttagttataaatcttgacgaagaacagctttcttggatgatttttaaatgtgtaatttctgatagggcattttagtttctaattttagtagttagtgatgttaatttccactttcatggtgaattgaagtattaattgtcctttttcctgttgttgattacgcagaatcaagaatcgtattataggattacgctttcgtaactgttaaacgggtttctgaaatccgttaaaattacgtcaattatttgttttttgccattcgataaatttatggaaattacgagttcttggttcgtatctttcgtctggtttttgagtgttctaccgagaaatttgtcgtcgtttattttctccatgccattcttatatgaattaattcgacattttacaggtgacttcaattctctttcgctgaacgaaa

SEQ ID NO: 13959 - DNA, 1383 bp, Mimulus guttatus
  Intron number 1 from transcript mgv1a007754m (locus mgv1a0 04275m.g) derived from phytozome v7.0 (chr-ID scaffold_30; pos 1116285 to 1117667 reverse strand)
cttcagagccccgacggcgacgtcaccatcagtaagctctgcgtttttttacctgatcgtgctcatttttttgatgcgcattgtttcaattgttgaagttttgtgattttttgttttgtctggttttgagttgagtagggctttgtaggctagggttttggaccgtttcgattcagtcattttggtgtggtttgcattgtctggattgaagatttgatacagggagatatctgcttctagatttttgttgttgtagagttgatggtgaatttgtgtgaacccgaagtaggaggtgtctcttttatgtcttccccaagtagaatgtgtaaagatgaaaagtatttgggcaagggatggacttgtatgtatcttttcgccaagtagattgtgtaaagatgaatttttttatttagttgcctctggcgtcatcttatgttctgttagctaaagaattctaaagaggattaattgaatttttagtggttaagaggttagttgtggaagcctaaatctaggtaaaagttgcccgttagaagtggttgacgaaattcttgtgagagctgttaaaaattgtaattaaacatctccatagtatcacgtatcaacaaagaagtgagagttggttttctgggtgtgttaaagaaaaaaaatgcgtgtttagtttggctttatctgttgtcttaactagctcccctgatgtagtaaagtggacatcctgtttattttcttatgttaccttggatgcataacatgtggatatggtttgaacttatttctgtcctaaaagtacttaacgcttttgtagttctgtataaatactatgtttaagcatctccattgtagtaactatgaaactactatacctgacctggtattttggggtgttgcagataattgatgtgcttgttctctgattctgttatttaatcaagattacctgcttcttgttgtttttataaaacaagatttgatgagcattctaatttttaatactgcagtgtctttttattatattctcttgtatgcataaactgtgtttgaatttgttgatctttcagaaattgtatataatttttatattaatgaatcagtttgaaagtcttgcccattgttgtttaaaacttgataaagttgatttttaagattttttaatctaactgtctatatgactgaatcaattgaaatgcttaattgtcaagggaatggttgttttcttttccattattcaactagaatattgtgatcgttcgtaacttttctttattgtagaaactaaactcagttttgaaattgtagaatattactagtttgaaagtgcttattgaagtaactaataaagactttgttagataaaacttatatatttttgttatgctgcagcaa

SEQ ID NO: 13960 - DNA, 642 bp, Mimulus guttatus
  Intron number 3 from transcript mgv1a024540m (locus mgv1a0 24540m.g) derived from phytozome v7.0 (chr-ID scaffold_384 ; pos 125307 to 125948 reverse strand)
cacagaaacttctgcaggcagattgctttgttgaggtattgtttatgaattatgattagcttttaaatattgtactaatatcgttcgtttttataatctagtccggatagttaaaatcatttagcacagtaatttctattcgcagtcgaatttcaccgttagattaaatcaagaatttggtttgttttacgatcaagaaagcgacttttctaacatctgcgaatcgggtttttttgctttagttaaattatgtagattgtagaacagcctcgatgtcttttcgctaattaaatgtgtatttagtacactatttattggttttggagctacttatggggtaagagatggacaaatgcaagatgggacatagaaaatttgtccggttttattacggacggacaccacacaaaaacccaacatgttctatggcctgtctccttatcgacatgtcaaacaaatcactcaaacgttaacatttttgtcgtgcaatttacagattctttagatgtaaaaaaaaaaaaaaaatcttcccactattggctgttttcatgtttcttgaaaatgatttttaattatgcaggttgatcagatgaaaacacatgtacagagtccacataggcacataaacggagcgaagaaccg

SEQ ID NO: 13961 - DNA, 1245 bp, Mimulus guttatus
  Intron number 5 from transcript mgv1a003090m (locus mgv1a0 03090m.g) derived from phytozome v7.0 (chr-ID scaffold_5; pos 1379755 to 1380999)
gaatccaactggttcacttcttgcttccgggttagcataagctataaatattacttatctgaagcatgatttatctttattttcttgccctgggattttaatctcaataacttctttcttgatgtatgatatgtacatgcactcacttgcttggaagtttcccattgttttaattgtatcagaattaaatcgttcgagatcgtatgacctagggcttaagattcgaagctaagagaatgccgtcaaactcattcataatccttaacaatcttcttaacaactcaacattaactaatcctcctagttatggaacctatctagctgtgcacagaagaaatattttacgccttcattgaaaatgaagaagatacataggaagtaggatctttgtggtttttagagttagatagataagaatccagagtcaaataatgctgtttgtttgtctgattttctataggtgatttgtgtagtttttcggaagcacctattactcgatttcttaatgtccttgttttccaggactctatgtattattttttgaatttgagtatatcacactcgaccctttcttgttttatctttatgcactgcttctatgacatattggttgatttcgttttatccttgggctaaaagaaaaaaagagacctgcttggattaatctaaagttttatagctggcaatttatgtattcccatgaaactggtgtccgatcaacttcatagaaacgaaatacaacaacatttggtagatatgtaaattttcaatgattttagttgacaaaaagaagatgatgttcttatgatctgggttttggatctgagacaactagattaagtatggcttgtcatttccgtatctttctcacaaaacatgcaagaaccagtacattgttcacatcatatccagtgtgatatgcttgattgtcaatgtatctatctgtagttgcatttaatgacaaaactatcatggatcctcatgtttcttcagcatcttttcaaattgtacatcagttgttttgattagattttatttcacacacgtgtatagtcagttcactcttcatactcttctaagtatgggattaaacttcttgacttggtcgaatcttcatagtttatcacttgtaatgcatctttatgttctattctgttaattcaattcctattattattatttttattttttatgtttatctgttttataggtctggagattcaactgctagaatttggactgtgg

SEQ ID NO: 13962 - DNA, 650 bp, Mimulus guttatus
  Intron number 3 from transcript mgv1a012955m (locus mgv1a0 12955m.g) derived from phytozome v7.0 (chr-ID scaffold_51; pos 520272 to 520921)
ctctcgtagctgaggtaaatcttcattcattctctctctcatgtatactgatttatatataccacatatctaccgcagttatatgagtgaagggtttattttttaagccatgaaagtaaatatgctgcccttctttgggtggttgtggggttttaaatgatggaatgaattcgacctaacttttgttcatttgatttgcattaattaaatttggtaaacattcaaatgtttacccaaatattttttgtcgttcaacggagaggtttagtgcgtataaatttgtaatagtcaagctcacatcctatctattatccacgtttataaacgggacataagttcattgaatttagttgttgatgtagatagacctagcagatgaaattcttctaaatttattctgaagtcagggggctattatgttattttgatatatacagtagaacctcgataaattaatagtggataaattaataacctcgcttaaataatagtttttttggtcccgactcggtaataacctactaaattaatatttcgctaaattaatagaattttgctagtcccaactgaattaatttatagaggtttaactatcgtgttttattcaattaaatttgaaattaattttgtaggtacccccggctgaagga

SEQ ID NO: 13963 - DNA, 666 bp, Mimulus guttatus; identical to SEQ ID NO: 13922
  Intron number 3 from transcript mgv1a015461m (locus mgv1a0 15461m.g) derived from phytozome v7.0 (chr-ID scaffold_8; pos 3392367 to 3393032 reverse strand)

SEQ ID NO: 13964 - DNA, 1036 bp, Mimulus guttatus
  Intron number 1 from transcript mgv1a005031m (locus mgv1a0 05031m.g) derived from phytozome v7.0 (chr-ID scaffold_30; pos 1722122 to 1723157 reverse strand)
tgtcttcatttgttttcagctcttcttgtttcttggtaagtgtgtctgtgtgtgtgtgtgtgtgtgtgtgtgtgtggggtgtaaatttgagctctttttgaacatttttgacaatgcctattgtacaatggtagtattaattagtttatttctgtctctagattttggggcacccttcaaactaattaggtgtgtaaacgagccgagtctcgagttcgagttcgagcttttgtcgagccggctcagctcatttcatttacacagctgaaattgattcattgccaaagtagtggttttatttctgattgcttccttaacttcattaagggcagttgtgtaatttttgggactttggataatgattaatacttgtcggtggctaattaaattgcttaattaggtttttaggatgagtatttttttgggtggagggtttcaactctcaagtgttgggcttttatttcatttttaattaccacattgtaaatgctttctaagtttctttgtagcagcaaattcttattcctacattaatcgtgtcctaaaataatgattagtgtggaaatttatccaagtagggaaacattagggtatcaaaaaatggtttcgaaatgtggatatataatcaatgtgacatgttcatttttactatacatgttggctgtgttattacatgatttgttgtttgattgaagccatgatttcattgttcgatttgaaaaaaaataaatcaagtagaaatactagataacctactcatgaacatttcaaatatacatatgttagaattctttcttctctttcttgaataacaacttgttacgtagtcattcttgatgtcttattagttattaccaagattcaatcttgcgctttctcgaataacaacttcttacatagtcattcttttatgtcgtaccaagattcaatcttgcgctttcttgaattacaacttcttacataatcatttctgagatttgattatcaagaatcaatctttaaaaaaaaattcaatctttttttatctcataggcac

SEQ ID NO: 13965 - DNA, 1248 bp, Mimulus guttatus
  Intron number 7 from transcript mgv1a001808m (locus mgv1a0 01808m.g) derived from phytozome v7.0 (chr-ID scaffold_241 ; pos 161574 to 162821)
ggtgagtttgcttttcatggtttctaccacaaatgtttctaaacaccgtgatgacttaaatctaagagattataacaagtctcttaatgctatatatattatccgttgtacggctccttgtctctgttttccgcaaaatcagcaacttgttatagttcctttgaatagaaagtctactaaggtaacatatgcgaactgaatgtgtgtgaatgttttattagtcttaaataaccaaagaacaaaatgtaccgataatgaattgtgactcaactgtaaatcataactatttaaagtcttttctcaaaactctatggaagacaaatcgaacaatgctctgtgactttatcagctagacaaagatttaagcagttggttttgttgctaatgggaagaaacgtaagaaaaatatattcactgttaaaacttaggtacttaagtttacatccatagcaaagatgtagtatatatttcagcaggactggactgaactactaaacaattgagcatacaaccaaaatgtattatgactacctccgctgggaatcctgatatacttaaaaaaacaaagaatatatcgattactttgtagttgcaattatcggatttcctgtggttagttttacctgatatcccagggtaaatataaataagatcaatttagttgacgctggaaaactatttttctctttggaatacttgttgagttagtaaaatatatcgttgcagtgtggattactaatatagcagttacttttcgaaccactataatttttcaatcaggagatttttttttttttctttttcattttcctctgtttaagaatgatttgcaggtattgaatctcaaactagataagactgcaatgtttcgtttattgaatattttggattctgttgccgggaatcctgttaagatgaataaaagttcgaatctctcttggtccttagtaatatcaaagtaatgtcatcaagcttatgatataaaatctacacaagaaagatattggctcacaaacagacgaatcagagatccattttttcagattttacatctctgtcttggattagcaatatgtatgctttgccaacagttccgttgctgtttctgatacctttttccactgcatcatttcccacttcaatttttttcctagttgtcacagtttagttaagccagatttatcaaaaggactgtaggctgcaagtaagacatgttcacttatgtttctttgttttgttactgcagga

SEQ ID NO: 13966 - DNA, 212 bp, Mimulus guttatus
  Intron number 24 from transcript mgv1a000207m (locus mgv1a 000207m.g) derived from phytozome v7.0 (chr-ID scaffold_41 ; pos 880041 to 880252 reverse strand)
tgccttggactagaccaccccgacactgctcacaggcacaaaccttttttccctctgctcatttcatattattagtaatttcaccgcgaaccaatgttttctatgctaaattattctctgggatttgatttattactgtatgtagctgctcgagttgttttgagacctgagtacaatatttaagacgatacatttttttttgggctgcagct

SEQ ID NO: 13967 - DNA, 781 bp, Mimulus guttatus
  Intron number 1 from transcript mgv1a008068m (locus mgv1a0 08068m.g) derived from phytozome v7.0 (chr-ID scaffold_16; pos 1904762 to 1905542)
tggaagaccaacggtaaaaaaaaaaaaaaaaaaatttgttcttcccttttttcaagtgtttattgccgtttcgacttcaaactcgattttgatcattcttttaactccaaattttgcagaatcggaaacatagaatttgtagctttttgagttagctttagaatccaatttgaattaccaaaatttgatgtcggacgagaaagatatacattaatcaacgaacactgcccacaactgtgagctatctaaaattcagaatgtgattcattcatgcataactttgtcacacggcatctagtctaactgatttaagttggattagaaagctaatccaaagtactacagttttcgtgtttcgaattttgcccaaatcatactagaaatatgtcaaagttaggttcgaagtttcaaaatgtattagtaaaattgaaacgacgtataacatttccgggttttttatttgatttttgttattgatgtcaatggatatagagaaggtttattatatgcttcagaattatttacgctacgaattttcttaggcgaatttcgtataacatcaagttttatataaattttctgatgtatatgtgattttgataactagtaatgtaatgcataatctgattttgaagtggatgaaatcattgtcgaaaataattcagagtaatgattaataatcagttgattagttatcgaaccagatttttttgatagaaactgacgagtatcttatactctctgtaataacgaaatagaaatatttctcgtatagaaacac

SEQ ID NO: 13968 - DNA, 521 bp, Mimulus guttatus
  Intron number 7 from transcript mgv1a011813m (locus mgv1a0 11813m.g) derived from phytozome v7.0 (chr-ID scaffold_18; pos 1198773 to 1199293 reverse strand)
aagcggttcaatctcgtcatgtcagtattttattttcgtctattcttaatattgttttgtagtttctacacaagtatgattttctgttagctttttctcgattttgttaatgccagaaatctttaaatatgcatgcacatttcgggtatatgattatacatctcaatggtgtggtatgtggaaattggaacaaataacccttatattgccttaaaagattttatggcaccaccaagataagtgatatttattttaataccttatcaaaatcgcaatatatgttggttatgcagagtccaaattctgtgaaatgctaacactgttacaaacttgtggcttttctaaggctttagagcaagcataagctaaaattgatggtgtttctcctgattggacgatttaaatgagatttggatgaattaacaatcatcagtgctaggtgcagcctctcttgagatttaacatgcatggtattgttctaactttatcttaatgattattggatgcagaaaatcgacaaa

SEQ ID NO: 13969 - DNA, 1620 bp, Mimulus guttatus
  Intron number 1 from transcript mgv1a013973m (locus mgv1a0 13973m.g) derived from phytozome v7.0 (chr-ID scaffold_90; pos 624333 to 625952 reverse strand)
aaaacagagaaggttttcaaagactgtgttggcaggtacaaaatatcgccccgaatgttggcgcgatttcttatcttattatttcgttgcgtttcaatttcctgattttgtctagttcgttgaaggaattgaaatttccccttttgttcatgaaattcatgtttctatttgtctgttctgattgaattaagtacttgtacatacgccattgcttgctgtgtggtttgggaaaaaaaactaattttgttgttagggcaaacaccagttagtcgaaaggataggtggaatgcttagatcaaagttgaggaaaaccaaagaaaaattgatgaagattttcttaatagcctgatctagtaaactaaccggcaacaaaacaatatcgtaagggtttctcgggattttggaaatagcatatgtagatgagaaatttgacgtaattaggaagtatgtctgtgtgtgctggacctctctctttgtcccttctgctagtataaacggaatccgctaggtttagtgcttctgtagactaatgttacaaatagatatcaaaaaacatcaagtgagaaattttcgggaattaaacaactctacatgtttgaagtaggattggtgtctcagtgacttcctaagcctagatagacagataggttatgccaaaggcattttgcataacacaacataaatcgttgcgttcacaaattattcgaaaacattccttgcactttggttgaactcttgagttcaacatttgatttcgatttggttaaatcattatatcttttgaatgttttattctttgaagtttgatccatacttgctacttagtcatcatttccttgagtctgatgttgatttttttacgtgtttcttatttgcagtttttattttattttaataatcattgcatttcagtgagagttacattcttggttctgtttatctccttctttgtctgaaatcacactctagaaaggaataaaacggacttataaccataaatgtttgggttgaaaatttacacaaacctccctaaagggtctagctgtaaatacacctaactttagggaggtatgtgcagtttagtttattcttagtattttaatgttgatattgatttttataatgagaaacgtgtttagatcttgatactgataaatttgtctattctttgaaagtatgagatgagctagaatgttagaggtgcagagtgtcgatattaaacttgtcacctatgtaacgaaggattcccttccttcaactggattcgagcatgtgctacgggtggttagcttggtacattctatgaaatagctaagccaacctgctctgttaagatcctcatttagtgtacgcattttatgaattttattacctacgtataccgatatgaacataatatgattagggtctctgaataattagcgtgattgggaaattgacgagttaattatatactagtatgatttatgatgagatttaagaatacttgatgtagctttcatttagatgtgctggtgaaactccatgttcaattgcatttgaagtatcatgttgcatagttcaagttacagtacctgtaatcattcatttgacattctttttttacttaggcccagtgag

SEQ ID NO: 13970 - DNA, 1107 bp, Mimulus guttatus
  Intron number 18 from transcript mgv1a000052m (locus mgv1a 000052m.g) derived from phytozome v7.0 (chr-ID scaffold_6; pos 691769 to 692875)
gagtaaatctgcctgctcacactgtggtgattaaggttgttccactttaaactttacatttctgataatgtgttcctatcagaatcggttatctatgaacatgcaatcatggacttctacatgcaatcttaaaaatcattatcatgtattctttgaatttgtctagtttcttcctggctctatctttggtgtagttcactagaggaactgctttcttcgattagtgatatcattgtccaatcccctccataattatgttttgaaatgtatcttctattctcattttggtaactaatctgtgctgccatttcctttatgtgtataatgacatttcacttctaaaaactagtaaaataaatgacagattaaatttctagtttgagagtcaagctgtataggtacataattttactttcttcaactctgatttatatatgagttctaataagacatttatttctgcacggacagactgatataaactcctgattttgacgtcttgtttgatttaagtattattcaatggggttgcctagatatgttgctgcggttaacatgtttggtaaaaggactggtccaaattgacacattcgtattgaactaaattttttgtttattttctatattgcgttagtatattttgttttgattttattaataatttgcttaaagttaacttctactaaaatcaataatattctcattcgcccatttttgatcaattttaatttatgttaaaaatgttatttgtgatgtttcttgtggtataacattttcttctggttccctcttctgtctgaactgtaataaaagatgacttgatgtaaaggtttcttcacggtgtttgaatcagctaaatcttctgctatttttcgtgtttcactttgttgtatagaagcatatattttccagctcctgtggtaatcagtttatgtaatttgaataagctgttttgctgcctgtgtggtaatttttggtatttgctccctgtacttcacttgccttgtacaaccaaatttcaacctttggaacttcactaaagcaatagatcaagtttgctagagctgaacatgtttttatgcatattataccagggaactcaaatat

SEQ ID NO: 13971 - DNA, 1454 bp, Mimulus guttatus
  Intron number 3 from transcript mgv1a009102m (locus mgv1a0 09102m.g) derived from phytozome v7.0 (chr-ID scaffold_228 ; pos 196192 to 197645)
tgaacgaatccaacggctctaacgcttccttttcggttagtgtctcgtcttattctgtttatttttatttatttattttattttactttatttattataaaaaatgcaaatagaaagtaggcacacacgattggacaagcgtagtacattttgaggtggggcccactcccatctgttggttctttgttcattccccctccaaaaactacggttctgggtcccacaccacgttgcattattatttaaaaattattagtaataaataataataaattccattagtggcggtaaaatcttcaaaaaaaaaaaaagaacagatgtttgattcattaacgtatgcacgttgattagctggctggccataaatgatttatttttctctattattagttatcactattatttaatcccaaataggagagaattaaaatttggatatttgaagttagatgtatctacattcaccagtttttcagttttatattgtgctacatcgagtgaaatacaccaagtctaactttgtcatttatatacacacaaaacacacacatccacattggtgtgtgtagattaacgtttaaaattcatctaaagtaatcttcactggactggatgaagtatagaaataaaccagtttttctgacgcagactgtaatggcaaattaggtacagaatctcctaattaaatcaaaaggcaaaacccaaaatcttggtatgatttaagtagttgttgagactttttagaaattcttggagttggtaatcaaatcacaaatgagaagacaaagtggggaatcttttattagtattattaattaaatagttaagagagaaaaaaaaaattcacgttacccattaaggtacagtgtctttgctgattgcttttcttaatatttatatttcatatttacaacttatatatgctggctgaataaaataaaataatgatatatgctaattaaaaagacaattttgatcactctagaaagttaatgtgagctaattaagtaattagtagcgtttaaactaatctctgttctcaaccatccaactaggcacgtggggttcacccaccaacatagttgcctacacgcatgtgtgaacatgtgaaccaaaagattatgaatatatgtgaacatgtgaactatatatatatatatatatatatatatatatatatatatatatatatatatatatatatatatatatattaagcacaagattatgaatctatgcacatctttccatgttcattagcctaattaacacaaagaatctactgtccaagtctgataattatagtattattactactaaacaaattttcctcattccacaacctctattgcatttaacacccctgtatttactctaattgtccaaaaaaactacccctaaaaacttttcaatgtgcaggattcttacctaaggcacatagccagcacaccaat

SEQ ID NO: 13972 - DNA, 2041 bp, Mimulus guttatus
  Intron number 2 from transcript mgv1a023243m (locus mgv1a0 23243m.g) derived from phytozome v7.0 (chr-ID scaffold_1; pos 1780670 to 1782710)
cggctattttatatcagctgtggttacctgttggtgtaagttccactttataaagttagctgcaaaattacgagaatcttgtttttttttttttttttgttttttttaataaaatgggttaactgtagtattaatacctgcatagtatatcatcgagtttgtccaccaaacttgttttaaagtttcaaaattcttgagttgtgggaaatggcattggtaaaaggcagtgcctagcagtttagtcttatccctaacatcattgatttactcaaaacctataaattttgtgatgttgacacttcagaccttatcatttaatttttataccctggccaatctcaagtatgccttttggttttttcttgcattttattttctccgtggatggctgagcattagttgggaaagctaaaatatagtacaccatcttttttccttaaatttgtttagcttaagcgtataacatcagtggtacaattcacgttaaaaaacaagattatgaatattcataatggaccttcccaattatttgatcaagtaataattaggatctcttgaaatatttttgtaggaagagaaaagttttttagaggggaatatgtgggagaatgtattaatgtttgattttattcagggagaatgaaaacatgccataatcctagcttctttgttttcgattaattttttttgccatacatcttttttctttcataatataaacttgttttatatcttacgaactaaacatttttgcaatttttttatctaattaatttctgaatgaatacactaattttactaaagtacattagaatgtcccaaaatctatattagtctacttaatcattcttgattaagtggtttaatttaatttttagttatacactcacatgtattttgtgccaaaataactagctggtatcattgttatttagttcacgagttctacatcaaggaatattttgtattgccttacccgaaacttcctattctatatttcatttactttgcatgctagctgttaagttcgtaagcatatgttaaatcatatcgtcggacggaaagcttcttggttatcacccgtatggtatttggttctagacaactcgtgtataatgcttatccatacttcactaaggcgtagagtatttttgattttaaaggttgaaactcattactatataggaatttactcatattttgtttcttgatatcttcgattgtagatatggcaactttacatgggaaagagataaatattatcaataaaaacaagtccgtgttgttatcgtttgctgcaattggttgagtcgagagacaatgttgttttgtattaacacacctaataaaattgatcgatatcgcatatacataacttgcttttattcagtattactagcacaagagtaatagcaaattttgatctcatgtatattgttatactataacggtcaattcaatcgctagattccaaaaaaactatgtactacaattattgattagcttagaatgagactttagctgtaattaattactagtaggatatcccataaaatgacatttctcgttatgcttgagtcagctaatctactttattgatgctatttaactaagttggaggttttaatcttgaccgacgcttgacttttctttaggtagatcgtgcatttgtgattaacggttgaggaactaagtatcttttttaattttctccgtgattttgtagttaatcctttcgattagctggttgttttacatgataaaagttgtgcacacctgtgtaattagtagacaccaaattaattttacctcagccatttaagttggatcatttactatgatttggctagctaaaagttgcccaatttttttagcatgcactgtcttgatagacaacttttcttcttccatgtttattgtgtgtttaagaatttttagatcctttggctaatggttatattagaatatttatttaaatttttatctagccattctttgaatttatattgacccctgcactgattatttgcaggttagagtc

SEQ ID NO: 13973 - DNA, 2148 bp, Mimulus guttatus
  Intron number 1 from transcript mgv1a005452m (locus mgv1a0 05452m.g) derived from phytozome v7.0 (chr-ID scaffold_16; pos 1134264 to 1136411)
aaattaaacgaagcctcaacaactcacatttccaggtacgagaaatacacgttttattggtgctgtttacgatattattatagttatatatttgcgacaaagatttctgcaataggtctcgttcttgattataatgtaattaatgtcccatttctgcaacaaatattcatgtcttctctttatattttatttggttatggtgcacatctttgagtctatattggagaatttatgggctgatttttctccctcgacaccacgttatattcaattcggccttgttatgaacttacgtcatttcatcattttgccagtataggaaaagaaaaagttttggtctaactgtctctttcgatctttccaaaaataaggttacagttttgtagtgagtttttcttttaaattcttagttctttagtgagatgcttttgtaaaagtaattacacttttgttaattgatgaatcctattggccactttgtactagtgcggtatgacatagccaagaatcttgttatttgactttgttttatcggcattgtcgccacttcagaatggcgacctttttgtttccgaaaataatttaataatgtgcaattccagataatcagttgtggaagttctttgtcactactttcctttctttggcttaagagttacgaaacattcactatgtgaaatgaacgttctggttttttgattcagtcctttctttttctccctcttgttgaagtgttgacatgaaaggaacgaatgagcatttttctatggagatgccgttaacataattctcgtgttaaattaatgctgtaataactgctgcttagtgtgtgtgcgtcttagattggactaaaatccgcacgttttttattctttggatattgatgtcacatttggccgtattcagtaggatttttttttttttttttttttttttaacttttctttttggtcagtgaccaagattgattattttttttataaaataaaaacttgcaacatgcacgagtttaaagtgcacggctgaaactgtaaaactgcttagtatgtggctacgctatttcaatagtcaatattgttggacttgggaatattgttgcaagcatattatcaagggtaaattacggccaccccggaggtaatgtcaaattacgaaaaagcccttggtgtttgaataattacgaccacccctcaactatgaatcttcttacacatccactcttgtagtgtcaaatttagtggaatcttattgattatgtcgaatattctctagtttgtacccgttttatcccattcgagttccatattttgaaacaagatatctctcttggcttgtaaatatcaaattgtggtgcatcagaaactgcatttttgcacaaaacaagtaccaactagagaatattccacgaaatctagaagattatgttgaatctgacaccataagggtgggcatgtaagaagattcatagttaacggggctggttgtaattacccaaacatgaggggtttcttttcttcgtaattggaccttaccttagggggtgtggccgtaatttaccgtattattaatgttgtttgacttgaaaatatgtggatattcctgtggtcagtcttatgagaagtttgcaccagaagcttagcagtaatctgttctgttttctgattgaagtgtagagcatgttactgatcgaatcaatgaagtaatatttgtagactagataaacagttatttaaattagtttgatggtagaacttagatgttagctttttattatggttatctatgttcatcgaatctgttccaactcttctcgtttatatccgacattcaagatctgaaactgagcgacgtttgtttacttatatagtatgtaaaaccgtaactcagattagatcgatgattcaattttattagcgtaacgaactccttaaaaacagaccatttagggggtttgtgcacaaaaaatccattataggggttccattataggggtactaaatgcaataaatttgtttctatatcaatttcttatgtggtcgatggaaatctgatttctaaaattttcaatttcttacgtgcacaattttccttattttttttatctacgtgacaggtggcggaacgagctcttttctggtggaacaacga

SEQ ID NO: 13974 - DNA, 613 bp, Mimulus guttatus
  Intron number 4 from transcript mgv1a005120m (locus mgv1a0 05120m.g) derived from phytozome v7.0 (chr-ID scaffold_273 ; pos 179358 to 179970)
aaggtgataagctaactctttcttgcacatagtctttatatctgcttatgttgttacatacgcaactttgctatcagactcttatcagttctgtttttacaccaagcatccttttgtggatgtttaatgtagaaagacattggaaatctcgacattttttttgtcccgtttttggcctttagtttattcagaaaaatcgacttcaaagccccggcaattgccttccctaaaaaaagaagttgatttagacattagattacgtaacaaaaagctcatgtatttagactttgaagttcttatatctcctttgccagtatgaaaaaacatcgtctcagcctgctgtattaaaaacgatctgtaacaatttcctttaattttttttcttttcttttcttttattttctttttggttttagtccaaagaatgagtgctacataaataattttaaaaaaatgaaacgacgaagcatagattacttctttcacatttgatattcataaataatatttcccatgtgtacttgttgagatcaatggtatatatgatgttaactattgtagatttataatacctgcaggtgcattgtggatttattcaaggtggaggagaaga

SEQ ID NO: 13975 - DNA, 1119 bp, Mimulus guttatus
  Intron number 2 from transcript mgv1a020415m (locus mgv1a0 20415m.g) derived from phytozome v7.0 (chr-ID scaffold_140 ; pos 485685 to 486803)
ccatattagaggtttccataaacttatttatcattgtgagtgtgttttttttctctacgtttttttgttatttttaacttcaaatccaagatatttgaatcagagtgtgaaggcataaataattattacagagttatctttgtataaaccgcatgttatttgtgaaggtatatttgttgatgagctggagctagaatacaaccacactctatctgaaggccttaactacgaagaaaacgccggatatccagagaattatcagacctgcgtaggcttcattttcttgctgaggaatataatatgggtactgagtaagtatccatgaaacaactatattcttttttttttctcccttcttacagttaaatatagattctgttaattagtgtctgctttaactcacaacagcaccgtaactccataactaacgccgtggacccgtcttttttctttctgaagttttaaacttttccagctagttccaaatatattagacacgacaacaaaatcgagcttttaaaaatcctggaatttgtgtcatattttacattaacaatttcccatttccatgtacgtagagactaaaagtatatagtattttcatgttctattattcttcccagtgggtcacagcagtcaacaacaagattcaaagaatccaaagggtcagagacatgttaataaacaaggtgaaggtttctgttggattccgtagctagaaaatacgatttatggatgtctataagatatggtatctgtgttttgtaggaagtattgtgtctgaagacaatgttgttggcaaaaatcaagaactaggttaaaagttttttcgtcttctcttttcctacatatataatatctcttttgttgacgctctattgcttttttcccttttccagttggctctagtaaaaacacgatgaaccagcaaacagatccagaggggcagcaatcatctgatcgtaaacttaaattaacttcatatagacaataccttatttctactgcacattccagattttaaattaagatttatattaaaagacaaaccttaaaatcgagctcgtcttattctgttcagcagacgcatccagcagacccaaagctcaaggacatcaa

SEQ ID NO: 13976 - DNA, 875 bp, Mimulus guttatus
  Intron number 1 from transcript mgv1a013726m (locus mgv1a0 13726m.g) derived from phytozome v7.0 (chr-ID scaffold_7; pos 1650415 to 1651289 reverse strand)
gagggaatttggcctttgcgttattcaaatttcaggtaattcatatattccaattttaggaataatctaattttcgatccaaaaaaattggaaatacgaaaaaatcggaattttgaaaattgaatgaaaaaaattgttccaaactcagattttttttctttttcgaattggtatcgactgaaattataaattctaatttttcgttcgcttttatgtaaactatataataatattgatatcatcggtgtagtatttaggatacaaatggaattgatgaaattattttcgaaaattgaaattgaattgtaaaattttaatcccatgtatatatattccaattcgaatcccaaatatttcccaaaaaaaaaatctgaaatctgaattttctagattcaaaatgaaaaggagaaattgtttcaagattgaaattaagggtaaattacggccaaccccggaggtaatgtcaaattacgaaaacctcccttatgtttgggtaattacaacgacccatcaacaatgaattttcttaacatgttcacccttacagtgttaaatttagtggaatcttctaaattacgtagaatattttccaacttgtatgtatcagattttggtgcatcagaaacagtatttttgcacaaaacgagtacatactagagattcaccgaatttagaagattatattgaatttgacatcataagggtggacgtgtaagaagattcatgattgagggtggtagttgtaattttccaaacaagaaggggggtttcgtaattcagcattatgtcgggggtggccgtaatttacccttgaaatcaatatatagttaagaatgcaatcaatgaaaattgtatcttatgcttgcagccaagaa

SEQ ID NO: 13977 - DNA, 1371 bp, Mimulus guttatus
  Intron number 1 from transcript mgv1a005296m (locus mgv1a0 05296m.g) derived from phytozome v7.0 (chr-ID scaffold_20; pos 691616 to 692986 reverse strand)
tgatattgctgattccgtctacgaaatcctccacggtaaagcttccgattttcactcccctcccccaatttctagacaatttgctggtttttttttttttttttttttttttttttttgcaattgaatttgtggttggataattataaactgttcatattagctgattttgaaggatgcatttttttttttctgtttattaatttcataatcataaattaaaaaaaaaaaaaaaaaactgtgaattaattgtgtgctagtaggtaaatgacatgctctattctggttactcattacatatagatatatagtttgtatattatattgaaagggtcaattacggctaccctgaggtaagattaaattacgaaaaaacgcctcatgtttggataattacaaccatccattgactatgaattttcttacacgtctacccttgcggtgtcaaatttagtggaattttctagattatgtggaatattttactgtttctactcgttcgagctccacattttgaaacaagatgatcgtaaaatgtgtctgttggcttgtaaatattagattgtgatgcatcagaaactgtatttttgcatcaaacgagtacaaattaaagaatattccacggaagaagattctgttaaatttgacactataagggtggacgtgtaaaatgattcataattgggggtggttctaattatccaaacatgagagttttttttcgtaatttgaacttacctcgggggtggccgtaatttatcctatattgaaattatcagcagtggcctatagaaggtgaaataccctcttgtccctatttccttcctcggatgctttggtgcaattgctcgtttcttggaatgatgatgctgaaatcactattttattcctatcttcatgtaaaggtttaacttttttacgattagttatgaataagatttaaggcatttagcagattacggacaagttctacgattaaagaaattaattagaactctagttgtcgtaaaaggaatcatttcgttgcaagtacctgcaaattttattattagttcaattgcaacttttactgtttattttttattgcaactgttttccattttgatgccttatggtggttgtatgaggaaataattattcgggaaaaagggtcgtcctttcatttgcataagtttgatttaaggatattatggtcctaatgattttgttttggaaatttctcgagagacttagcttttaaggtgatttaggatatactgtttttctgtattttattataattttggctccagcttcttttctgtaggtttttgatattttcggtgctactatataagtaataatcttgttacgtttcgtgcacaggaagaat

SEQ ID NO: 13978 - DNA, 1598 bp, Mimulus guttatus
  Intron number 1 from transcript mgv1a009331m (locus mgv1a0 09331m.g) derived from phytozome v7.0 (chr-ID scaffold_161 ; pos 530641 to 532238 reverse strand)
gctgaagagatctgtctcttcacaaaggttagatttttatttttcatttattttattttaattattacttttttttagtgggattttagcattgtaaatttttcaattttatttttgtttgaatgtatattaaatatccaagctttgggggtggggggtgggttttgttatggggtttggttcattggagtagtgggattgtttactggatgcaggaggattaagttttttttttttatttagcattttttgggggttattttggaattattggataatttcaatgtttcttgaaatgtttatgtatgtgtttatttatctcaacttatttaccatccctctgcaacttctatgaattttgagatgctgctttatgaattacaatgtcgataaacttagcgacttaaaactactaattcatcgaggcgatttaatgaatttgttttgaatttttatgttttttggccatttccttgtggagttgtagaaagatcgaatctttaatatttcgtatttcagttatgtaaagttttaatgaatttgtttcgaaatggcgtgaagagattcttaatctatatgttttttggcaatttctttgtgaacttgtagaatgatcgaatttttaacatttcatatttcggttatgtgaagttaaaatgaattttaatgaatttgtttcgaaatggggtgaagagattgttaatgtatatgtttttgtgggattttctttaaagttgtagaaagatcgaatttttaacattttgtatttcggttatgtgaagttataatgaatttgtttcgaaatggtatgaagagattcttaatgtatatgttttttggcattttctttgtaaagttgtagaaagatcgaatttttaacatttcgtatttcggttatgtaaagttttaatgaatttgtttcgaaatggtatgaggagattcttaatcgatatgtttttttggcatttcgttgtaaagttgtagaaaaatcgaatttttaacatttcgtatttcagttatgtgaagttataatgaattttaatgaatttgtttccaaatggcgtgaagagattgttaatgtatatgttttttggggattctctttgtaaagttttagaaagatcgaatttttaacatttcgtatttcggttatgtgaactaataatgaattttaacgaatttgttgcgaaatggggtgaagagattgttaatttatatgttttttgatattttctttgtaaagttgtagaaagatcgaatttttaacatttcgtgtttcggttatgtgaagttataatgaattttaaagaatttgtttcgaaatggcgtgaagagattgttaatgtatatgttttatggcaatttctttgtaaagttgtagaaagatcgaattttttaacatttcgtatttcggttatgtgaagttaaaatgatttttaacgaatttgtttcgaaatggggtgaagagattgttaatttatatgttttttgggattttctttgtaaagttgtagaaagatcaattttttaacgtttcgtatttcggttatgtaaatatgacaggataccctaattataaagcctccgaagagacctcc

SEQ ID NO: 13979 - DNA, 1056 bp, Mimulus guttatus
  Intron number 1 from transcript mgv1a018389m (locus mgv1a0 18389m.g) derived from phytozome v7.0 (chr-ID scaffold_173 ; pos 10493 to 11548)
cccaataccctacagcaaccaccaatttccttctggtatgaattatttctttttcttcttcgtctctactaaattgtaatttatcagtaaatatatatatgttttttaaatattctaaagatttgaaaggtaatccgattttcacatggtggggttttgtgtaagtttttgtggattttgtattgcaattggcaattcagggtttggattaaggttttgatctaatagaatcagagtgctgattgtatcttttgttttagttctattttttcccctcaatttgacagagtgattttttctcgattcatgcttctctcttttagggttggggttgttaattagggtatgatatttcgattttaggatttattcttctaccttgagttatttttgacacgaagaggtaacacaagagtttgaataaagggtttgagtaagaattagagtgttaattgctccattactgttgaattacttatctatacagcagtttttttgacatcgccaatattttatcttcccgttttcctttattttttgactggaagatgagtgagttgttactcatccagtgatgcattgtgttttcttggagtgtagaagatatatgggaataaagatcgaagatgattcagaaagtaacttaaagcatgtatataaaagtatatgtgtgtatatatctgaactttgaaaataaatgttattaatttgcatcgtttcagaaaataatgcttcgacttctttatgcacaatatatgataaaacatcaacttcagtgagactatctacttttttcacgacaaagtaaatggtcagcaaaaattgcatgattatgtggtaatatatgttttggacgattgaatagaaactcagtgttctttccttagtgtgtttacttgctggtttactttgaaatttgtagttttctcgttttcttgctatgtataatgacttaaaactattgcaatattgcttctgatcttcctcgtccaacttaaattctgatgtctcttatcgtatttgttctgtaggggtcgaggacaacagggtgccatc

SEQ ID NO: 13980 - DNA, 931 bp, Mimulus guttatus
  Intron number 12 from transcript mgv1a003237m (locus mgv1a 003237m.g) derived from phytozome v7.0 (chr-ID scaffold_11 2; pos 835822 to 836752)
tttaattgtgagttcctcttagcttttcctctttaaattgtagtcgtacatgaatattctgagtcggtttaaatacgtgtttatgtctggatttttagcttctcatgattttaccttatttttctaacaaatttgtctgtagttacatgctgacgggtttatatctggatgtagataataaatgtgttgttaaaagtctttagttcgttttccaacaagacaaacatggaaatacagtagtttgttatggaaaatattggtaattcattttccctgcccagtctgaatgcaactcgttttcctctatgtgctaataatccttcagtaattatagttgatcggtccaattattttcatagtttgctgttgtactagccattaacatggtcccttcatagaccttgtacgacagatgccctctaaatatgaagaataaaatactgcagaaatacaatacatatggatacggataatatctgttggcgaaagtaaacttgtgcacatatgaagcattatatattaattctggcaacatactatactcatttcttagtatcaataatactaattaatcagataagagaatcaaattacaattaacgactaaaggaggttagatactttgtcgttaaagctaataattgttaccttctgtgtttagatagaactgttagtagttgcatttgtccctcccatttctaaatttttcttcggaaactatgacaaggataatattggttaggctctaacatattgaaccttttctgccttattcatcaacatatatgtttcagatgcagtgctatatttctcgtttaaataggtttgaggttgttaactttctgacgactatatgatgcccatttgaaccttgttctgttttaacatcaaagaaatttcctcttaacaggtattatcgagattggggcac

SEQ ID NO: 13981 - DNA, 1891 bp, Mimulus guttatus
  Intron number 3 from transcript mgv1a018527m (locus mgv1a0 18527m.g) derived from phytozome v7.0 (chr-ID scaffold_53; pos 159094 to 160984)
ttttaggtacctcaatatttttgttttcttgcgcttctctgttttagatatctgctgttgtaacaaaaattaaaaaaaaaattaaaaaaaaaatatttaaaaaaaaggtaaattacaaccacccctgaggtatggttaatttacaaaaaaatccttcttgtttggataattacatctacccctcaactataattttttcttacacctcaacccttatggtgtcaaattcaacataatcatttagatttcgtggaatgtgctctagtttgtactcgttttgtgtaaaaaatcagtttctgatgcaccacaatctgatatatacaagccaaaaaatacatattatgatcatcttgcttcaaaatgtgggagttcgaatggaataaaagggtattataatctcgaagatttcactaaatttgaaaccgcaagggtggacatgtaagaagatttatagttgaggggtgattgtaattacccaaacaagaggggagttttcgtaatttgaccatacctctgagttgttgtcatttacccaaaaaaaataataataaaaaaaataattaagcgaacgttgattcgttgtaatgtatgttgcagttacaatgattgctccaacagcactccctactgatgtgaaatgtccggacaaatttttgattaagacagtagttgcaagttccggcgctaccacagcagatggtatcaagaagctggtaaaaatatattcaaaattacttgttagaacgattactaatacaaacaagcatgaccggatttgacttcacaatttaacttattttccttgtttttgaaataaaaatctgaaatatgtggattggtatatttataatcatgaacatcaaattttggaatttgcagtttgataaggagactggatctcaatttcaagattgcaaattgggagttttctacactttcccaagccaagcctcgtcgacagttattgaaagatcattttccacttcggttggatcagagactacacatttgaataatattaaggttgcttgatttcactgaactatataatgtattattttctttatatgtgtgagtggttgatttctcattctgacataaaataattttacttgcgacggtcttcgtctcttcaacttttattccgttgattgtagttcttgtgtttgctctcattttcataatattaattcctttggttgaaatgcaagatggacataaccaaacttgttcaaattcagccttcggacctcaagtttgattgtgagtcgtcagatacatcattttaacgcattctctgagtttcatactttcttctattttttttctctccctatattaactgtttcttgatttcgattagttcaacgggggaaggagctctctagttttttcaaaatgacaaatatgaccgagagtcatatcttttttaaggtaagtttccattatcatctcagcaaatctaattcttgcaaatattcctacctttttttttttatcgctcaatctgccaatcctttcataactaactttgccttgcctaggcttcgtttggattgagtgatttaaaataaatataaattgggataatttgaaatcccgaacaattgcaatcgaaatgcaccgttgattgttccttcatatttttttaaattgacgtgaataaactacatatatcagttatatgtgtaggtgaagactacagatcaaaaaaaatatagtgttcaacaaaacattgggattttgttgccgcaatcaacttgtgatgtcattggtaactattttatattcttttttctccttgagtataatattagttttctctatttagtagtattatagagatgaagtgaacttagccaaaatttgttggtttttttgtgaagtgaga

SEQ ID NO: 13982 - DNA, 698 bp, Mimulus guttatus
  Intron number 11 from transcript mgv1a001301m (locus mgv1a 001301m.g) derived from phytozome v7.0 (chr-ID scaffold_21 0; pos 266640 to 267337 reverse strand)
gatatcgtgcacaggtatattaagatttttacaccagtatttatgatttatacatccgaacattttattccattagtatattagcaacgaagctcattttaattttcgatacaaattctaaattccagaatcttttagttttgtacggaccttggattctgacattctaacataattaggtttgcaacagtaaatggtctgtgaatttcaagcattgtcgctcgctaataacctgtatttagctgaactgcaaatattctcttacaatattttgtttccacatgttccgagtttttgcgttcttggttcgatatgcagtgcattactgcatttgtcttagcaaattttgttgaaaatctttttcttcaaccacaaggataaagttatgcatggtcataaatcttttcaacactacatttgttagataatttgatagattatataatatttagtagatttatgcttatctcagagaaaacttcgtttgttacggatttattattaatttgaaattcctccctcaaatctttccgtccaaatgcacccgcacccgtcatgtatcttaggtcatagttcttgattaaactagtgttcgcttttttcgtcgttgtatagttcttctgcaagaaattcttttatctttcattgacatcgagaaactctcgatatctgcagccattcatcgaacaatacgttgg

SEQ ID NO: 13983 - DNA, 1109 bp, Mimulus guttatus
  Intron number 2 from transcript mgv1a000072m (locus mgv1a0 00072m.g) derived from phytozome v7.0 (chr-ID scaffold_128 ; pos 70599 to 71707 reverse strand)
cggctggccagaagacttgcttgcacgttcatcgagtatgactttgctgctcaaacttttgtttaattttttgtttgaatttttctgatccctttaagacttatatatgtctgtgagcatgcatatggaagtgtgtaaaacatttgtcggtagattcggttttgcttttgttgacatttggaggtgttgaagcatgaacgaaaacgatagttgcgcgacacatggatttagcatttcctaactgtccaaaattctctctcttgtcaagagtttttcgacgaagattaaaatgcagttacttgggttgaacaattttggtgatatttgattcagcgttttggtgcattggcatatataagattctaagaatgatacaggagtctaaattttcgaagatattccttcaggctccatttaggttgatggatttggagttaaacgattgaaaattcatatgaacggatccctttagctagttggatgtttacatgttacaatgaattttaaatccatctgctcctattttggctaattttcgagtttagtggattacattatcgtagaaaattgagtcatttgatatccttctttcaaaacacccctcgaagccacattgttccatccaaatgcaaactttatgttttgttttctggtttttccttaattgtatttggaagtggcttctatgtacttgtagattctgttagtttaaaggcttagtcatcgagacttgtgactcttttgcgtgggacttcagttattattcatttctgcaaaatctaagttcatgcatttttagctgacagtgtaaaaaatgtactacagactgtttcacatacttgacctatttccgtcacatccctcatcacagttatcatatcttgatactccttctgctgtcttcttcaattgttgctactatattaattatatttattgacggttaaagctataactgggtttctccaaacccgtcattgtttgtaccataattttttagcttcatggattggattttttatgctgatgaagtttgtagttcacggcctagattttaaactacctttgttgtatgcaggctctaccttatctttacattccctgctctg

SEQ ID NO: 13984 - DNA, 1514 bp, Mimulus guttatus
  Intron number 1 from transcript mgv1a017274m (locus mgv1a0 17274m.g) derived from phytozome v7.0 (chr-ID scaffold_362 ; pos 83440 to 84953 reverse strand)
gacaaggtacatatttattatcattattaatttttatttattttagggtaaattatacccacacccctgaggtatgcttaaataattttaaggtccctatggtattaataattacactcaccccctgaaacgtagttagaaactctaacgggataatgcgttggatatattattccgataggattctaatggactattacttttagctagtggggaagataatatagaattatggggagctatggggtgacatggctcccccaatatgtcttaaatcacccataactctttgttgtctccaccacttcttgaaaccaatagaccgttagaactctatcgtaataacgtatccaatgcattatcccattacagtttataactacgtttcaaacggttgagtgtaattatcgataccacaaggaccttaaagttatttaagcatacctcaagggtgtgggtgtaatttaccctatattttataagtcattattatttttaattagtagattgaaaaattggattcgcatttattatagtaactggggctacattatttaaatttattaatgtagtggttggatctgattagtgattactgagtaggcacgtgaccgctgagacatattctaagttagtaatttgatccaatctatgagtcaaagtcaactttttggttttttttttctttttctttacttttttttagtttgacctcactagtggccatgagggttgtgtgtgaggtaattaggggtgttcattatgtacaatattgggatttcggtactttaaaaatgtatacgaacataattattcggctcggtgcatttttttaccatattaattcgattttttcggttcgatatcggtaaaaccaaaaatatatttcaatattttgaaaaatgtaagaaataattaaactaattaaatcttgaatttgacattcaaatttcaataatcgaccctaaaatattgattatcatagaggctaattgtaaataatgaaaaaaattatcaatctaaaattattttatagtttgctataactttaaagaatctaaataaaaagaaaaaaaaatatttattaaatatttcgtgtaccgaatagcgaatttcaaaaaaatcttcaccaaataccgaaccaaattttcggttcggtatttggcacgtaccgaatttccgattcgattcgcttcggtcgatttatcagccaagtgaacacccctacaaataagtgatacaggatatataagaatgattataattatatatttaattaacttgatccttgttaataacaagtcatgattgaaatacaaaataatatcgaattatacaattaattactctaattttattttgtttattatttcgaatacattgtcaattaaattgataaatcataaatctctataaaacttccttttctttttaatgtggaaatacccaatataaataaggattttctaaggagcttatgttgtggcgatggaatatgcaggtggaagaactgg

SEQ ID NO: 13985 - DNA, 693 bp, Mimulus guttatus
  Intron number 1 from transcript mgv1a017472m (locus mgv1a0 17472m.g) derived from phytozome v7.0 (chr-ID scaffold_104 ; pos 930107 to 930799)
aagtggctcgaagaagaatcctcttccgctgccaagtacgcaaattatccctcttttctttctcatttgctatcgtttcagctatatccactgatcaactacctctagggtagaatcagctgatcagaatatgcatttcttatctatttatatttgtttaatcaaggtgagcgagatcaatttcatgggagaaactttgtatggattttattttctggattttaatgtttgacaatgattcaatgaaatgctgattgaaattgccgaacaaacaaactgatgttaggtttacaggacgaaactgtataaattggaaagttgagaattcgtttttgtttacattttaagcaattcttcatggtggaagaaccaatacctctttcaaactaattaactcttatgaaatattgtttgatatcgaggatttgtagttttagaattgtattcggagaatttccattcaaatatgaattgatttaagtactgattctattccacctcgtataaagaaaagaagttagtctgcatgagggatactatgaaattcttgtttgatcgaagaaatcacagaaaacaaatcttacatggatccaattccaaacactacacactactagcttcttcctttttaagttttaaatgtaagttgagtaagtagtgtatgattctaatgtttgatgttattgcagagaa

SEQ ID NO: 13986 - DNA, 762 bp, Mimulus guttatus
  Intron number 2 from transcript mgv1a013499m (locus mgv1a0 13468m.g) derived from phytozome v7.0 (chr-ID scaffold_51; pos 416459 to 417220 reverse strand)
gacattcctgggtatgtatcctttcgttttttctccaaactatgtattttccttttgttagagttaacttcgtcatcgttctagcattctactgatatcaagctgtaattagtagcacatgaatacatgatacctctttatctaggtgccattagatactgatgcacacttgatctttgaacatgttgcttcttagctggaccactgggcttttagcaattgatatgtttgtggtagttcaaagtgattttgtgtggacattcgttcttgatcttatccgtacaaatttagagtctgatactacctaacactatattacacatttgtttctgcaaattaccatcacttatcttccgattgggcttttcttgcattccgaaagatgtttaattcccttgtggcatggaatgttaactcaccgtgcgcttgcactcataataaaggtgtttaccatatagaagatgaaccattcatgtgtaattaatcgttgagttccatgtccttttgatgaatagtatttgctattgccttataactatctattatttgtgagtgaaatctgataccactgatttctgaatttgcataacatatcaaagatggcagttgttagagttcctatgtggtttattgctaatgtttcactgttattcacatgaatctttaacattcttcgatttgtgattagaatatgtcaatgtaatctgattgctattgatatatgaagttgcaagacaggaaaacacacatctgaaaaaccgg

SEQ ID NO: 13987 - DNA, 1836 bp, Mimulus guttatus
  Intron number 1 from transcript mgv1a023271m (locus mgv1a0 23271m.g) derived from phytozome v7.0 (chr-ID scaffold_65; pos 1044617 to 1046452)
gttcttcggtgttggggaattttagagagataaatgttttaagttatgtgcgacattcgtaaactttagtacatgatttaatatttctgttttcaaattatatattgcaccactcgctatatattctatgtactacaaaatctgcaaacataggcacatacattttaattttcattactaattaataataagaatctagaaaaatatatatataacgccaaacgtagaagcatgcaaattaaaaactattatcgtgagatcaaaaaaaatgaaatagagcaattttactttcaatattttaaaattaaaatataataactgtaagcttgttatatcattcatttatacaaaccgaattttgtagctcacttccaaattaaatacattaccttaaataaagtctaaagatacatttggtttaaaaaaggaaagaaacagttattcaaatataaaaggagttaactaatataactactcgttccaaatgtattattaaccaaatatagtgattttcattctaccaaaaaataatacaagttaattaatgcaagaagaagaagaagaagattttttggaataataccaaaacatccaaacttgcttattcgtataatatattgtgttttagttgcaatttttcattgttggctaatgtttcatgtttgtacaattttgaaaagattacaatagactacaatttatacacattgcatttgaagttattctctcactacaaaaaaaagtattttatgtgacaattttttgtgacgaaaccaaattttgtcacagtaaaaggggatattgtgacaaaatttcacatcgtcacataagtgaacattttacgtgatgaaggttaatttcgtcacataaactttattttatgtgataataatgaaaaatcgtcaccatagaacatacaagatctttaaaaaattgacggttcctattttgtgacaaatatttaggtttcttatgacaaagtaattttgtcacaacataaaaataatataaattactaaaaaatctcctccaaaatttctagacatgcccgatccctttcttttcttctctcataaatcccttttttttccttctccttttttatttgttcattttttaattgaagaccatcgttgcaccaccaccaccatcattgcaccgccatcgttgcatcgccatcaccattgatctggctcttcgatctggctttcgcgtccaccaccatcgttgcaccgccagtgttcgtttgccttcgccaccgccagtgttcgtttcccttcgcctccgccagtctcaatcgattgaggtataatttctaatttatttttctctccatctcccctcttcactctaactccaccactcccgttttcttctctccattacttcaatggaatgttagggtttctgcataaaagggccaaaattccgttatgttctcaaaattaagttacgcagttttgtgattttatttttaaaacctatttaggctgatgtcaaaaattgccgaggttggagtcgatcggagctcgtgaatgggaattaggattctcagccattaggttcttcgttcaatacatttatcttattatcttaactcttaagctatagaggttgtctcgtccatctattgattactcttttttttttttttttttttttaatcttagattccattattgaagcatagttcaaactgcaatttgaagataacagtaatacattttgagctgaaagtaaatttttgggtccctttgctccatttgtttgtcaaacataaaaaattgatctacttttacagcacgttttggaaaggggaaaaccgcttgtacggag

SEQ ID NO: 13988 - DNA, 1126 bp, Mimulus guttatus
  Intron number 2 from transcript mgv1a003537m (locus mgv1a0 03537m.g) derived from phytozome v7.0 (chr-ID scaffold_124 ; pos 261891 to 263016 reverse strand)
aagccgtgttcttgcgctgctattctctctatttggtcggtttttttcgacaaccttcgttttttttttatatcgtcgtcattgaattttcgtgttttctggcctatgtttgaatccaatgctttcttttttctatgtatcatacctgttttgaataatttgttgaacttgcacctgccctcgttattttataccgagaatgaaaagcttcggaaatgttatgtattaaagtcacgtgctgcattttgattaggaagtatatttattacctaaggggtttggtgtggaagagttaatttagtgttcgtaagtattagcaagaattggaaattaagatgttaatgataagtttttagtattatgaaacatcttgaactgttgtaggaaatatatgaatggattcgagttttctatgacaaatgcttcgtctgttataggtttgaaagtgtgcataaaattacttgtactttagatagctgaaatctgatgcaattcgattgaaaagttgcagatctcacgtgttgtataaaataagtctatattgtctaatttgattggaggttgatggcacaatgtcatttctcgatgaaaatgtctgtgacctctatttgtgatgagtgtaataatgatttcgatgttcgaattttaattcttacatctctgaatatagtaaaaggattacatataaagaattttatttgatgctttcggtttgttctatgctactcccggtgaacttatgcgtgcatagatccttatgtattttacatacttccaaattatatgtgagcgctcgtgtgtaaatcaaaggtggaaaaaactaccttgtatatttcaccacgtgtagcatctagccatctactacatcagtattttcctaatataatattttaaacatttcaatcactctatttaattgttaatagccataaaactaatgcaactgaaaatcgaggattgttatctgttagcttttgagtttctctcactcttcggaaaaaaaaacttatattttcaattcttttaagttctttcacatctttttatatctacaaagtcctaattaaattcttactcacctcttttttggctctcaaaggctggagagaagcgaaaagaagaagag

SEQ ID NO: 13989 - DNA, 559 bp, Mimulus guttatus
  Intron number 1 from transcript mgv1a006301m (locus mgv1a0 06301m.g) derived from phytozome v7.0 (chr-ID scaffold_2; pos 1560095 to 1560653 reverse strand)
tttagtccgaccatttctcgtatctgtatcccgaggtgaatttaatttctgttacttgtttaatcctgctaatttcctctcatttgtgtttaattttgctaaataattcatttattcgttggattggaaaacctgcggtttcattttattgcccacctacttgtgtgtgtgtgtgtgtgtgtgctgtttcttccgaatggattttagctatggtgatccatatagctggttctagatgatgggtattttgcaggattaattttatgtttacttcaaaaaggaataattattccaaatattttgttgattgatctctgtgtatgtgaatttatcattattgatggagttgttgtagtagcttggtctgcattttcgtgatttgatcgtcggatggtgtctgtgtgcagaattccgttactactttcattgtaaatgaatcaaataattccgatgaaattaatcagaatttccttactgctttcttctgaattgaacgaaattattctgatttaatttgaacaaacccattgtgatctcaacagttcgttaagcattcacc

SEQ ID NO: 13990 - DNA, 487 bp, Mimulus guttatus
  Intron number 2 from transcript mgv1a004700m (locus mgv1a0 04700m.g) derived from phytozome v7.0 (chr-ID scaffold_7; pos 2718345 to 2718831)
caaaattctctcctataaaatataatccatttcaggtaatttttctcgctttaaatttctcattgtcaatacatttttagtagattgaaattctacttccgaattacatgatttttttgcgagcgtaaattttttccttgatttgttattgttgatgatgatgatgtttggtgggttttcaagaattaatcggttgaattacgatatgtttttttcttatattattgaaaaacaaattcagattttcccgcttaaatacgcaaatatgggttttgatgagaacaaattgagtacttttggtttcgttctgtgctaatttgattatcttctactggtgtcacaaaggtgtttgtgaaaaggtcgcagtgaagtgattatttgcttattttatctaattacatgtatgtatattctcttgaaatcaactcgattctgaagtatttaattattctccttttttacgataacctagccagttcgacactcg

SEQ ID NO: 13991 - DNA, 1611 bp, Mimulus guttatus
  Intron number 5 from transcript mgv1a003059m (locus mgv1a0 03059m.g) derived from phytozome v7.0 (chr-ID scaffold_47; pos 411501 to 413111 reverse strand)
aaagtggaatccatcaggttggtgttgaatgggtcaatttctgaagtgttttccttaagattctttgcatccttatattcagtcttgttttatctgattaccactgtcataaaatgcgacttggaactcataaatcgatatctagcatcttgtggcttatcaatgagtttttctggaaatataagagcccaccagaataaaattaagaaatagggaaatgattaagatctcgaggttagatttatagtaggcattttctcagtttcgttaagatctgatttaatgatgaattgccccgttgaggtttccaaaagtatcaggacccttcagtaagctactaagctctttgatattgtagtaatttactttatatagttgggttttggattattttactcactatagttacccatttatttatagatgatgttggacataatatgttttttactttttattctgattttcattcagagtaacaggtttacaattttttaccgaaaagtcgttctcttgcttttatatttgtaagcttattcgcttttgagagagtgatcattgtttaggaattaaaagataaaaatgtagtagtaggaaggccggaggctactagagtgtgattccgtttccgctgtacttcactttctctacttgtgtcagagaaaaccactgatttgacccttctttattattttcttggcctttgctgtatttttgtccaggaaatggtagagtggtatggaggattaaattcttacaagatcctgttttattagcaagaagttctttgacacactcaactgactgtcatttctttgcctaaccgagttattttaaagacttttaacttgcagtccttgtgccctttgccaacttttccatcagcagtttgagtccttggctaagttcatcatggacgttacaagctaatcctagatttatgttggaattagcttgtcaattcctttctgctcggtgtgtggcgtaatggtattcgaccagactctatagttagaagtttgaagaggctccattcatattaagcatgaccaagcctatgttggaacctcatttacatgtcatggtcttagtagattcttaaagcctagaaatttttttgggattttacaaaatggattttcgtgctccacttttgacaaattatgtgttggattcatttgcctgatgtacatgtataaatttcttaagagacttctccgatattcttaaaatcagggcgcatgttagattgtgtgactcgagcttttgtcataatgaaaagcctcaattcttctccttttcaaatatatgtttcacacgaaagtaatacaaagtaattggttccctagtacttttcctatataaaaatgatttcaaaatatatgcagatagcctcacagactaatccatacaacatttgtttcttggataaaaatgcctttatttgacttgaggggtgcattttgttcatagttcctgctgcttctgattgtatcaatttatgcttgtctaagaaattgtatatagtatgttaaaattcttttacatcaagtaaaactttgtcttatattatgcttttcctattaattattcttcgagccattttgcagg

SEQ ID NO: 13992 - DNA, 1288 bp, Mimulus guttatus
  Intron number 2 from transcript mgv1a025287m (locus mgv1a0 25287m.g) derived from phytozome v7.0 (chr-ID scaffold_337 ; pos 2504 to 3791 reverse strand)
tgcagaaagtacgtgattcatttccttctcccattttgtatttacgatttctttttttattttcattcctccactttcagtatcctttcgtttttgttggattggtccgacatcataatcttttataattatcccaactatctaattttattgttcttggatatgctatacacgtcttgcataactcgtgtctttgttgatataatgacttgaatttccgatgatggacattaggttaaatatcacatagttaagtccaagatttgcccttttccattttataaagcttctgcatattgctgtttctattgctaaactcatttgcttttatatcttttcattaagtgctttaactatctagaatcaatcactgaatgcattcatcgatgggcacatgtagcttgtagtacagttgagcctattgactactaaatcttggataaaggtctgagtgacgattaatacaagtctaaaagaggcaaatagagatagaagttaaaaggcctgcatgaattattatttttattgaaacgcggagacacccaaaggagttaaaggcaagttcagttcaaaatttatgacagaggaacacaaattgaattttgaacctcggtttagagggagggaggtaaaatgagcctcccgatctcaaggatctaagtttctcaagacatgaaaaagtacataatattttggccatatatatcatatctatcatgaaaggaccttctgttctttagttcttttagggtagaagtgctgggaaactgaaaatggagcctgattggtggagtgcgctggaacttactctatctcgttcagatattcagaaatcgtgatgcctcatagttgatatagtctatgtagttgaagagttctgtatgcatttctctagtgagatccttttttattatccttgatgatgagtctaagtctctggctccattacacaagcagaccttaaagcaacattctcagatcttaattaagttattttgttttttgtgccacaaaatcttgtttgtttctttatttttttgtggatgagagagttggatttattgagggtatgagtgggaggtcacccttattcgaggactgatgtttctatcatctattttacctattaccatccaatgttttaatgaaagaacatttactgtagacttagttggtggatttgacaagggttttactgtagtgggcttagttcaattgcttatgatggatttttactgtaatgggtgtagtttaatttcttatcgggattgtggctttcaggaaaaag

SEQ ID NO: 13993 - DNA, 1170 bp, Mimulus guttatus
  Intron number 3 from transcript mgv1a003322m (locus mgv1a0 03322m.g) derived from phytozome v7.0 (chr-ID scaffold_4; pos 2543597 to 2544766)
cttgagcaactcaaaggaaagagtgaagtcaaaaggtccagatactttgaatttttttgtctttcaaaattgctcttctaattttctaattatgctattctacctgattgttatatctcttctagatacgatcttatgaataaaattttctagtaatgtgtggatgttaaaatgagccgacacagaggaataggattgatcaataaacacataaagaaaatctagggggtatatgctttataagatttacaactttacactctgatgtttctgtgctgtttcctgaatttttttgagcccagttgagtccgaaaacattaattattatgctatgctggtttaccttcccaagttttttgaggtattctgttatcttttagttggtttaggtaggtggtcggaggggggtgggttcagcaattaaatcaggaacaacttgtaaggcttaaaaagcaaagaaataactcaggataataatcgtatgaaatacatagcattgagatgcattgttgaatgttgtagcttagtgattactaggaaaatgatgatgtgtgtgaaaatactatgatgaagatgctgctttctgttaagaaatcacttcaaaagcatggagtatcatcctattttcttatttttgcttaactttttgatatataactactgttttttaagggtccgtatcagctgaataactgtgtctcttttaaggatcccgtttttcaaattatggtttcaaattatgttctaaccatagtgagaggacggaagtatactttatatgcatccggtatttgtacattgctgattgtatgaatgcaaatgtaacaagactaatagtaagctatggggattagtatatgttagctacaattcacagtacatagtagtaacaacacctgctactccacagccatatcagtagtcggagcaagtttattaggttcaagttcaactaaaatggggaatacattatgagcatttctgtattttatataattcgggagtgaaataaattgtgtaactgacatgcacttccgtttttaactctagacttgtgtttttctgtttccatttgaaaatttccaacacgaatttactttctgtgatattgatttgtatctttcgtgttgttcagagggactgtttttgggggagctcggccacgagaac

SEQ ID NO: 13994 - DNA, 500 bp, Mimulus guttatus
  Intron number 1 from transcript mgv1a005768m (locus mgv1a0 05768m.g) derived from phytozome v7.0 (chr-ID scaffold_11; pos 1850954 to 1851453 reverse strand)
tccctctgttagcgccgtcactgaattctccttaggtaagctctctcgattattacgtgtcctaattatccccttttatctgaagaaacaaaaatgaactccgtaagcttacagtatgggtttaggtcaggaataaagatattttgttcgtacgtgtttcgggaaaaaaaattaattacattatgctaatttgtgatgcgtgatttaatttgtgcattattttgggtttttaaggttttggtatcagtttgtagattagttttgtagaattctttgtattcctttctcaatacctgcttgtgtttgttaatctagcgggaattggttctgtaaaatttgatttttccagagaatttgaattcgtccccctcaacacgatttgagtttgaattggttctttgtatttacttatttatgcatatattacaatcctttaatctttatcttacctctttggttttgcagttgtttccgggcctacgactctgcagctatctcca

SEQ ID NO: 13995 - DNA, 955 bp, Mimulus guttatus
  Intron number 1 from transcript mgv1a024384m (locus mgv1a0 24384m.g) derived from phytozome v7.0 (chr-ID scaffold_29; pos 1251255 to 1252209 reverse strand)
taattctgctgctggaataattctggtggagcaaggtgagaatctcaccttgctccaccagaagccgcttccattctagcagaagtaattctcacctttcttctttccgaggtaattgcatcttcattttttcaattctttgaattctaacttgattttcttactgttagtagattcaattttttcatgttagatagaacataattgatttcggcatgtcagtgcctttagcgttctctagtgttgtatccttcaatttagggtaaattacggccacccttgaggtaaggtcaaattacgaaaaaaacccctcatgtttaggtaattacaaccaccgctgaactatgaattttcttacgcgttcacccttgcgatgtcaaatttagtggaatcttataaattatgtgaaatgttctccaatttgtacccattttgccctattcgagctccacattgataatcataaaatgtgtctcttggcctgtaaatatcagattgtggtgcatcaaaaactgcatttttgcacaaaacgagtacaaactagagaacattccacgctatctagaaaattctattgaatttgacacacaagagttgacgtgtaagaagattcatagttgaggcctgaggggtggttgtaattacccaagcaagagaggtttattcgtaatttgatcttactggtgtggccgtaatttacccttcaatttatacagaatgcagtgcgattttgttagtgtagtggttatttttcaagaattaaatcgaatttaataatgaggatattcattgcatcattcttcaatatggttacaattcttaccttttgcttaagaatttgtgtatttatcttcgtataagccagatgtatgaatgacaaatttaatgctattctattaatatttttaatttgtgttcagaaataaatttcggaggtcgcattatatatagtaga

SEQ ID NO: 13996 - DNA, 894 bp, Mimulus guttatus
  Intron number 4 from transcript mgv1a000749m (locus mgv1a0 00749m.g) derived from phytozome v7.0 (chr-ID scaffold_247 ; pos 153365 to 154258)
cgaaggagtttgctgattgggttgcaaaggtccacgtgacttctttttcctcttcttattgtattctgatgcttccaaactacaaataaaggactcaatcgaagctacagaaaactacaaatgtttttaagactaggttgatagatatatttttatcctttcagtaggcaatgaatctatatttggtgtctttctttaatagaattaagctattatgagtaacaaataaaaaaacagacatgtgattttgctggatttttatttttgtgtggtctgatgcaaccaaaatgatccttatgcaacaaaatatttgtcatagtgaagtccttagtcgtatctggttagggataaggtctgctgcaaccaaaaatctcttagcgacgaaatgtttatcacacaggaatttttaggcaattctaatcagggatacattttagctctttccgttggttttagatgacttcatttgtgatcatatgaggacataacactttacaactagaggtaagagaaaatattgataagctttcttggaaagggagaaaatgagggtaaaaagttgttaaaatgacgcatttagatttccttcgttgatttagattgtgacttgttttgaaaattgaatagaagtaaagaaaaggtttttccacatatttttcggtgatgtttttgatctctactcctcttctcactctataattggtttttaatacattagtttctgcacaaggcattctatctactagagtctttacaacaagagttgcttctaactaatgtcttttctatgctttattgttatgcggtgcattttgttggtttagagtttagattcttgaaacatgcatggatatgctaatatctgttttcaatagtgcaggtacatcagcagcc

SEQ ID NO: 13997 - DNA, 974 bp, Mimulus guttatus
  Intron number 7 from transcript mgv1a001085m (locus mgv1a0 01085m.g) derived from phytozome v7.0 (chr-ID scaffold_327 ; pos 98491 to 99464)
tgaattttggtaccgcagttgtttctcaagtctaatttttttatatatcttggtggtcacggatgacggttgcaaatctgctttcttggttctacattttctttagctccggttttgttttaattagtgtcaaaatggggtagatcgctttaggatcaagaaattctttgatttcgggtaaagggcttgggatagttgaaatctggttcggtttaagtgttgtattagttcattctgacttacacaatggtatacttattgttcactttgctgggcaaaaagggaaaaaaactgttctgaatgggtagtttatcaagtcttgtaaaaattaggttacattctaccaagctactattagtagtgtagcatatggacctagatacacaaaatagtagttcatatgttagtgcatgggttgattctggagatttgtaaatatttttcggtttgatgaggaccatttgttagtttaatgcttcaataaacaagattgtaacgtttctttaagttgattgccattctcaggggattatgtgaatttcgtactcctttattcagattaagaaactttatggagaattttctagatagtgagacagattagcctttttttgggactgaaaggtaaatgtccaaacagattccttaggtattttaaatcaagaatttgactgcataacaaactcttagcattactatataactcccataggatcaataaatacagctgtaccgctaatgacataatatttatttgctttcttgcaaacaaatgcaggaattatagtttatctcttagttgcgcatgcatttactactgctgatatgattactgttttcttgatatgctgttcattgctcctaattagtcatgttttttttcaactgtttaattatgaacccccccgttgtacatggtagctcacttttgcttcacaggtctgcttattgtgaagctgaattgccgccagaga

SEQ ID NO: 13998 - DNA, 2258 bp, Mimulus guttatus
  Intron number 2 from transcript mgv1a007326m (locus mgv1a0 07301m.g) derived from phytozome v7.0 (chr-ID scaffold_23; pos 2093179 to 2095436)
tcgctggagctattcgagagtttaagagaaatcaggttggtttttcatgaatcagttgtttcatggagtatcatctactatctcaatttgcttgcttaaaatgactttatatagtagtgttgcgtgaaaatgtttgttttattgcatttatgtgattcaaagtaatatcatgtaatattttcatgtcactgggctgtattttagacgcataacataaatcgaggagggtgagtgcaagtgtttagcttttggagatttttgtttcagataattatgtggatgtttaacaggatgggctatctttatctttatttgaccttctaagcctttattatgcactgaggtgatgtagtaactgttctttgccacgtgaattctccagttaaaacttgaccttctacttacagttgatctgtcatgtcaatatttgctttacttatgggaactgtatataaagtttgaggtgaattactattgttatcattgcttctgtgtgcttcgagggagagagtaggtctatgtagagaactaatccttatgtcaatctgttggtttctaaatccctgcgttgctgttccaaagagtcaagtctcgacagatcttagttttggagatttgacctaatacaacacggtatgagttactgtcctgtaattccagtatgttgtttttggatttgctgaagcatggaccatccttgcaaaactgatttaaatagaactgaatgaccactctgtgccatgttccctttatttctgtatgccttttgtttgtgcctttgtggtggagttgctgttttaacattgaagaatctagtcaacaattttacgaaaaagaacctgactaattctgatttcagaacaaataactagacattcgcattcaaattcatttttcttttgatttttttatgaatctcaggattttggaatgtggcaaaagttttatttctaagaatgatttttcacaattacatttcttgaaattgctaaaaaggctgataagattttccattcagctatcctttgtaaagctgttcattgtctattctttttaatgaacttgaagctgtttaacatatacttcaatcttccgggtcattttttgatctgtaatgatttagtaaaagagtttgttccctaaaccgttaaaagttttttggtggtgtttgttgggaggaggggaaagacagagctcaatcttattatgtttttcactcaagtccccagttatctttttatgtagagagacattaaagcatatttccaaaagaattcgtgcagattgtacaagtaaccagactcggtatttgtgaatatacatttctaatggaataagacaccttgagatgcatcttttccagatagcttgcaatatcgagagtgcttacaacatgttaaatctggacttgatagtcgcgcttttagaaactaatgtattgggaaatatactttatagctgtaaaaattattagtgcagtttatctgtcttctttgcaatttgcattacttgtagacttgtagtttacgagatagagagtgctcattacttgaggtcaaaacttttccactagtaccatttactgatcttagctcgttgtaagatttttatgcttctaaatcactagttcccaactagttatctatgtcatcgtctttctgtatttacatgaaaacaaaattatatgcttttctacaaatttataggatgtaattttgttctcatataaacataattgatggatgatccaactcaagttacaatattatgctcttctatgatgtctcatggcttaaacacactctcagtcatgtgtgtttggcttcttttttagttgccatctccgctgcggacatgcgatgcaaacataattgggatattttagtttatgagtacccgtctttcagtcaatttatatatacaaatttagcatcaacctataacatatgatttaggaaatcagaacttttgaacgacttctctagcgggattatttgtttatataagaacataacaggattgagtccttcccattgattgcgatgaactatatgctttcttttttaccgatgacgtatgaatttaagattgcactatatcaatctcttggcggactcttgaccgattacttaatctcattacattattaaatagctctctcaatatattttctagcttgagtctgccttgacattatgacttctgatttcattattgtcgtttttgtattcagtcgttttggcacttggcctgtagcc

SEQ ID NO: 13999 - DNA, 3432 bp, Mimulus guttatus
  Intron number 2 from transcript mgv1a023272m (locus mgv1a0 23272m.g) derived from phytozome v7.0 (chr-ID scaffold_30; pos 51178 to 54609 reverse strand)
accccctcgacgataaagacctcgaccatttcgtactacaccaaacctaatatttttttaatcttgaattaatatttgttactctgtagttcaagaaatattggaatttaatttccatatatcaagatgaaattaattaatgatggtaattaattagtgctcgaattctggtgttgaatgatgttttgtttaatttcaagggtttattagggataaccccttgttcatattttctaatgaggtggatccaattttttttcccctttttgagatagatccaattttgccaacttggcaaatatattatataattttcctttaatacccctgttttattttttaaaaggcatttatttcctttactacgtgatttgagatttgctgatacgttgcctaaaatcacggaataaaattacgtgagatcattggccgttatatcaaatcgtgtacaatatttttcgaaggttctcttcagcgttccagcggttctttatcatctttgaagatttatgcaccgtcgttgaaataggatcgaatttgagctttcgttgttggacgttgttaaccgggtatgaatgcgttattcgtttttatttttcgctcaatgtctaggattgtcgattacggtggttagaaattttaagggttgtgttgatacttgattctatgaagtagaacgttttttaacaaaattacgtcgtcatatatacatcgttatttttggcggatgatgtttgtttggaagaggattgacagagttagaagaggatgcttcacgcagatcggaccagagttgttttatatgagcttcgtagttggtttatgcaataatcggaataattgtccgctgtggtcgagttcatgtttatgatcccgatcgatagttggtttatttgtttataatagccgatttaagtgtgctgggtagtacattaaaatatagttcgtagtcttttttaaattagcgtatggattttgcattttaagtttatttttgatgatattaatgtattgtcattcaaatgtatttgcagtctatttaatcattttttagtattctgcattttttattttgtttcatgattttaggttttttcgatggcgaatttcgtaagtattttgttgaggtttggtgggttggttgctataaagaggtgtttacgatgtaatggctcggtaacttcgattaagttttaaaccgttgtaatacagtagtatactattatgaatatcgtatgatactaccattatcattttattatactattatgagattattaatgtactagagttttttaactcgacatattgattttattgtgttatgatgtgttttatgtattttatcaaaaccctagattgaaattatgagattattaatgtactattttattggttatgttggaatactttacgttggtgttgttctcaatgttcttgtcatttcagtggtatattgtttgtaacacaattcatatcactactataatcgtaatatactatcatagcagatcaatgtactatattgaaattattaatatactatgtggttgaataatacgggatccatagtcgattaacgagatccatagtcgaattagatgaataagatagtctaatacatgatataaggaaaattagcctaattgattagtatttcaaacaaacatattattcagtttccatatatattattattttttcatatatatcattatttaccctaatcgttttcatataataaggaaaattaccctgattgattagtatttcaaacaaacatattattcagtttccatatatattattattctttccaatagtcatttaactaaacccatagtcgaattagatacatgggatagtctattaaaagatatgagatagtctattaattttaaaacacaaatccgccgccgtcacttctcaaatctagggttttgatgattcttcggcccatagtcgattaacgagatccatagtaaaattatatcagtgggatagtctactaaatgatatgggatagtatattaatacagatgtaattcgactatgcatctcgttaatcaactatgggccgaagaattatcaaaaccctagatttgagtaatcctatattcgagtaaccctagattggagcagtgacggcgacggcgacggcgacggccaacgacgatatcacttctggtggatgtcctgcccatcaattgttgcaatatcactgatttagtgctcgaatgcggtatgcgattataacagatctgcaaatacacaaacgtgatagtcgatttagccaaaacatatcaacaaatcgatggatgatagcgattcagcgaggggcgacgacgtacctacggcagcttgctcggagtgcacgaaaatcgtcgtttcacggcagtgcagacgtcttcccctttcaatcggccgcaccgggaagttgttttgggagtttttgcagtttattcgatagtggggtttgggatgatagtgatttaacggaaaaataggaagggatttgattttatttcaaaaggtaaagtaacgggttttgtgggatttgattgagggtaattatgtaattagaaaaagtttgatgatgtgtataattggatttaggcccaagatgctcaaattggcccatctagaggaaaaatccaattaacattcttaattacattcaacttgtcccacattggtttctaacaagaaaaccacatcaaactacacctataaatatgtgttatcatacacataacaaggtaagcactatttaggcaattaattaatattatttgcttatattgtgatagttttctgacttgagcgtcggaggacaatcgccgggccacccccggcgtgtcacctagtgttttcaactgttttgtaggttaacgagtggagcgatcccttcgactacctgagcagcatcatttgggttgttatcaaaatggcaaatataaatttgggtctacccctattatttgaatgtttaagggggttatatctaatagaccctaatttcaattaacttgcttgcaacttgtccgattaatatagcggttctcgtaaaaaatctgaattttgccgatttatgcgcttaagtgaggtcactgtttggatttagagtgggaatacaaatatcaacgactaatcggaattcatcgaatgaggataggagagaataagttaggacagaggatgataacataatcgaaatcaaaccaagacaaatagttggcaaatcgaatctgttacgggacggtatatctgtttatcccatcaaatttaggaattgtgttgtttatcggtacactaataattcgaactcccaatttttttttttttttgtagtgctttcaagaaactctttcttgatgtagtagccccacttacggctcgttttttggttgtttttagaagttcttgtctgaa

SEQ ID NO: 14000 - DNA, 2851 bp, Mimulus guttatus
  Intron number 1 from transcript mgv1a017441m (locus mgv1a0 17441m.g) derived from phytozome v7.0 (chr-ID scaffold_498 ; pos 5065 to 7915 reverse strand)
cgagtacaagactttccgccaaattagtcgcgacagtaagtcaatttcgcctctttagtatgtatgtgttgagagtttgtttgttcaattttggagtttgctcatatgtttccatgtgatcggagtgattggaatgccttgggtttgctctttagattgatatgctttccctgaagaactccggggactttgtttttaagctttcgatttttaacggtatttgctatgatggaattcgtgatcttcgtctatttgtttttttactttggcagtagatttcttacatggaattactggtgtatctgtaatttatgttatttgatgggagggtgggtggattggggatggggggtgaactccataacataacaaataaactgtaacataattatgggtagtgtcccaagcattggcatcatgtaaatttatataacttgatggaaaagtacaggttctgagaataattttagattggaattgttggatgtcttggggtggagaaaatagttcacatcttagacattgtcgaaaatcattcaacgggctttgacagaaggaacttgttttgatatgaggtgttttgcatagaatactgttatatatcgcccagttcagggtaacaaccacaaaggggtaggatgatggtcttaataattccttcaaaaaatatattaaactggcagttgaatgtgcaatttgaagataagcaatcaatattgatcttcattttctatgaagctggaaaaacagtatttctagtagttgtttagttttttaccttttgattgttgaagaacatagaacaaccttctcaaatacagacgtggcggtggtagttattaaatttataacatatatattgaaattgaattacaagtttaacccaagaaaaaagtaaataaaacgtttcatatcagatcgaaggtaccaataaaaaaaaagaagcagccttctatgatcagaaggaaaacatcaattctgtgtaaagaatctcttgagtaagtactgttattttacattatatatgtgggttatgattggtcagtattgttgtgtttcataatctatgttatttgcggcttgaaagtcccgtcatttgtgctagtcatagaggtgtatcggttttgtgcaatccctccattttgctggagttgattaaaaagaataagaaaaaaaaacaattaagatcatgttgtgaatcttttcataaccttgcgtggcttaaacttttgtttctattctctcgttcactttttatctgcctcatcttatattagtttctccttattttagatttttgtacctacttttagattgaatttttatttctttctcgtgtccaattaataggctaaagttatgatgtattacttgttcctaaggaattctgctagtgataatgaatgtcaaaagttatagtagaagaaaccaacttcttggtaataaaaaagtgtgtaatataatctttgaatcataagtttgaatattgtatctttcaatgtaatgtctttatgagctccaaatttatgctatttttatggtatttcgtctttctagttttctaggaccaatcttatattcaaattagtactcctttgttttggagggagaatttctccacgtgcatgaaaccttgtataatttttggttctagtgaagttgataaatttgatattgtatgcattttctgttgtccttctcttcgtaagcactctctcatatagattcttcgttatcttaatttttcctatcttctctttgtgacatttacttccagattgttctactcatttttgtgaattaatctttcttgttatacaataaaacaatctgtgcccgttagtgatctgggtaacttaaaccgtatagaggaggcagcaagatctagatgaatgtaactgcagatttcatgctgacattgataattcttgcatgaattggatttgtcaatattgattgagttgcaaatatgatagagtgaagggacaaatcactaaattaggcttgttattttagacatgttctccaactctaattgttgtttaactctcacgttcaatggtgcaccttctccgaggcattttatcgtttgtaaatcacttgatagagacctacttgctttcacacttttgctaagctagggtgtataaacatgtgggacaaagataacttactatttaggagtatgatagagagaagtaaatctttgtaccgtcccaaaaggatcacttgcctgtactctttgtcatggaagaaacaaacagaaaagctcgcaaaagcaagatctgagtatctgagtaatagttgaaaacttatttatgattttttgttcttttagtatcgaggaactttaatctgatttctgtattgtgtttctagttgggttcagggactgcactccttgatcactagaaactgttgatctataaacaaatcccaaatatacaacttctagacagcgaaataaactgttatatattctttatcatttattaatgcatacggttaaagaaaactattgaccttctcaacttggagtaaggcttccatttacatcagttctagatgcttgtaactaagcatgataacaatcaatgtgaaaccttcacaatttacagtctagtcatttataagctgttatctacgtggtattaccagtttgtgattcctggtgttactctggcctctattgtgacctgtgtggtgctcgtattatatgattccataatctttgaacatccatattagtgcaccgcttctgtttatcatggccgcatccttataggctaatgaattatttaagttatttaatgtagttaatatttccttcgtcaatttacaggattattgt

SEQ ID NO: 14001 - DNA, 1544 bp, Mimulus guttatus
  Intron number 1 from transcript mgv1a021832m (locus mgv1a0 21832m.g) derived from phytozome v7.0 (chr-ID scaffold_113 ; pos 64913 to 66456)
ggggtctaaacgcagccgtcgccacaagaagtgagtgattttttttttttacgttttttttcattgaattcgattttttgattgcgagtgtggtatgtgttaatggggatttgaaatttgaaactgtaatatgagttcttttagtttcgattgtgttggattttgtgaagtgcattgcagttggtttttcgtttcaacttgaagttgtgtgtagttaatccaagtgattcttgatcacaaagtgagttatgcttatgggaatttaaatttgaaattgtgcatgacttgttttagtttcgatcgtgttgaatttgtgaaatgtattgcaattcgtttttcgtttcaatttgaagttatgcgtagttaatccaagggtgtcattgaatttgaaaagttttggttgcggttcttgattgcaagtgtgttatgctaacggggatttaaactttgaaatcgtgtctgagttggtttagtttcgatcgtgtcgaatccgtgaaatgcattgcagttggttttggtttcaaagttatgagtagttaatccaagggtttcgcagaatttaaaagattctggtttcgattcttgattgcaaatatgttatgctgattggaattgaattttggtattgttaacgacttgtttagttgttttgaatgtgttgcgataacggttcgtttttagtgtttttggctttatttgatacactttgctttattggtacttaaatttttgtgaaatacatctcagtcggttttagtttcaaattgtcgttacgtgtgattgaatagcaaattcacaaaaatcatggaatgttattagattgtcgagtatatatagattttgataaatccaccgtagttcattgtctgatgctaaaacaacttttattagaccataacaattctcaagaaccgaaaatatctcttaatctatacgggtttctcgttattcgagatatagttaggctttaatttcttgatatagtaccgttctgattttaacgtcgacagcgaattttagttcttgattgattacttgggatctatcttatgaatccaatacgggttttaaacagaggtagtgaaaaatcgatgttcaataccttcgacttgtcaagttcttgattctggattacgtgctttgctttctttccctaattatcgaagcaaacacacatttgtctgaagttcacttagcaacataacgtttttcacttggcagtttcgtttagatattttattgttttgacattcaatagtcgactataattcgttctagtcgcagaaacagtctctcgggttttaattgttcaagtttctcttctatgtacgtgttaattactactattgcttattattatcgatattttgtagtttgaaatcaaattaaccaatcaaaatccctccgaacgaagctttatctctggatcaattctgcatttataaatctttaagtttcaacggcccgatgcttacaattttcttttatatatgatgtcatcatattcaggaacccggctcttactggtggaggagataaacgct

SEQ ID NO: 14002 - DNA, 852 bp, Mimulus guttatus
  Intron number 9 from transcript mgv1a005517m (locus mgv1a0 05517m.g) derived from phytozome v7.0 (chr-ID scaffold_2; pos 1276687 to 1277538 reverse strand)
ctttggcagtgtttctcttgttggaaattatacgagtaagtcatgtgaaagaaagttgctttctctcaaatgttttacaccattttttgcctacatcaaatttcgacaatttcgtggaattgtattagtagaatagcggcaatctactgaaatatctactagtagctaatattgatttttctacttgtaggaaactgaaatttcatgctttccagttcctacttttcaacactgattctagtatataattacatctaaataaaccatttattgcactatttagctgaagataagataacaatcagtggcaaagcagtcatgttactctccataaaaatagaatcttattttaacatttccaagatctttctgatctggacatgtttgcagtgcagttatggggtaatatgcatgataagacttaataaagacatatttgaatccttttgcttgtttgaatggggcattaaaatttttggtttcctttcaccgttcgagcatttttcatttctcttctggagtaaataaaatcaacaagatagaagtcatgtaacaaaatggaggaatcaagagagatcatctcatgtaggaagtgcagggtagaacttgtctttcctcaatcacccctttcttaaacagaatggcaagagtcccctggcttctgttgtgtcaataatacatttgtggtttattctgtcagtttgcttctttttgtgtcgataatgcttttgtggtttacgatgttattttgcttctttttatgtcaatggtgctttttccttttatggtttattattctatttatggcatgtttattgggctctaaaataattttgcttttcctggttagat

SEQ ID NO: 14003 - DNA, 1099 bp, Mimulus guttatus
  Intron number 2 from transcript mgv1a007860m (locus mgv1a0 07860m.g) derived from phytozome v7.0 (chr-ID scaffold_121 ; pos 23301 to 24399)
aaatcagaatcgtccaactccggtgatcggtgacggtgagatttaccggcgtactgcatcaattttttttttcttctaatttttagttgcaggatgttattaattcgtttaattgaatgatttggttgaagatggaatatccctaaccctaatttattccattgttctctgatgggttatgttttatatatatggtttccaccaaaaaaattctgctcaattattttgggggctgtgctttcgtttatcgagttttagttttaggatactgatatttgaagctacgaatttgcttatatcgcatacttttgatactgatattttcataattttcattttagtctgaaatttaagcctgaaaattttgtcagtaaataattgtaatcaattagaaaatgcttatagtaaatgtaaagctgtaatttctatagtgaacatgctcagtaaacatttgtaggacttagacttgatgttttccattagggatctctttcaaatgtattagttagtaatcagtcacaattctttgagatattatatttaaaggaaatcctgttatgctcaatctattggtgaaatcaatataaaaacatcgaaagtcgttaaggaaacagttatctacaaagtaatagcttagataaaaaaaataacgtgccttcataaacgttccattttccagaattttcactaatttgtgtatttgccggaatttttatgctttaaaagataactcgctacttttttttcttgtttagtcacaaataagttcgacttatccacaaagactaccattttagagtttgtgccaatttttttgatattttataacggtagatacttctaaaggcaacttggtgattttatctggaaatacttactgatatggaaaattgaactacgtaggttatatacatattcagacgatcttttatgactgttttgacttttgttgtatctgaataataccttgttatacatatcgctctgttgacaagaaagttcttttgccgaaggctttgcttcatgcatagtataattttgatccaccagaatttgattttgttttacaattttctttttacttgaactttgcctagat

SEQ ID NO: 14004 - DNA, 198 bp, Mimulus guttatus
  Intron number 1 from transcript mgv1a015043m (locus mgv1a0 15043m.g) derived from phytozome v7.0 (chr-ID scaffold_8; pos 637421 to 637618)
gatcccaccaggtattcgacgttatgcctcttcgaaaaatatcaaaatcagctctaccaaaaaaataaataaaaatttgctcttttgattggttattgatgcgggttcccgttattaactttcacaagctagtgattctttttttttttttcttttttggcagtgctgataaagggaatcttggggtgccgcagttac

SEQ ID NO: 14005 - DNA, 3128 bp, Mimulus guttatus
  Intron number 5 from transcript mgv1a000924m (locus mgv1a0 00924m.g) derived from phytozome v7.0 (chr-ID scaffold_14; pos 2115637 to 2118764)
tgcggggagtcattgagtacagaaagctcagtcaggtaactcactacaaactcttggttgatgcctttttcttcggctgaagtgctgctatttgctttttattcttaattattgcttccatgctcatgtgaataaaaactttaattgttttccgattcgtttgcgtcttattacctaaaaatattaaatagtttatacggtggaaaaaggctttgggaaattagtttctgtaggacactaaaattctataaggttagtagtttgctcataggcatagtttttaggattgagcaagtgcccgattcatttgtgccctccgaagatttcggaagtcttttgggatgtcgaagaatttctaataattcaaaggttacggttctcccagcaatctttagtagcagcattgatacttgagactgccgagttcttggcctcataacacttcgttcagttgtttgattcttcaatcttaaggctgtatcattgaagaatgacgtaattttggtcatatactcgttttttaccgttcttgcttcttgcattattgtctggtattgaatgagccacttgtggtggtatctctttgttcattggatattcttcgtgcaaaattctagagtgaaagaaaaaaaattgaatgtcgctttcataattatataatattcaggaaatcgatgaagtattgatttatacatcgagtttgtaaatgttgtatgtaatgccacttcttgtacttgactgcatctttattttcgagaaagaaaaatatttaccggaattgtctaggcctgttgcaatttgtttctacttgctgcaggaaggattttcatatcttcgtaaacaaattaaaataatgatttctgaatttttttatgcgatttttaaattacgggtcttcttgtttcactttcaaatatatatatattttaattttcttgggtggatcatttatcgatgatgtttgtatagctgtcgtgcatgcattttattccatttcacagtggccatctcaagtatcagactgctaatgctgggaggacgtttaggcgctaggaatgtaataatacataggaagaatgtcgattgctatatcgactactagcgattcaaagcaatcattattagtggggggtattttggtaatatgatcataagaatgtcacaagttgagtgtttgtgagtattacggtgaatgttttggagctatgttagatcattgagttagagattgaatcaatctgtcgtagttttaattttccgatttgcaatttgattttctgtgttcttattcttttgtttatgtgtatattaggtttctttgaacatatctgtttattttatatgatctacgatatctccgtttgatagttatatttctgaaaatgtttatttaagttgtgcaaattttatctttgctagttagctaaaagtataactagtagtggtagatgagcttttacgagttatcaccctcttcgttgtaacttaaacttgtgaacatgtatattcccaagtctgataagttttttgtctttgttttctacttaaatacttcccaacaaaacacgatcccggaaaaaaaaaatcgaacaaatacactcgtattaatcaatttgagattttgttgacaaattccatcaattcgcctaaagtattcgacaagtttaacattacgaaaaaaaacgtagttttccaaagttacaatagggttctcctcatatggaggctagttggattttaggtaaaagcttcgttcaatagtgggcatgaaactggatcgatcacgagtgaagaagagcaaagttgctcttcttttaaaaataagaagataagcttttgtcgtattccgtaatataagcacggtaattctaattgcatccgtgtacgtatggctctattcaaatcggaccgggaaggtcggattggttgacctttgacctggccgttggtccaggtcacagttcatcgaaaaactggaaataggtaaaaataatgcaaacaggtaattcaataaatggatttcttctatttaaacaagcttcatatttattttgtttttattttcttgtagttttagtctgtgaaattacaaaacaacctgctactcaaaaaccttctcccctccacatgaaaacgatgtgcgacgataaattatgacaggcagaatatttgtttaaattatctgcgttttttcggatcgtaaaataaaagatttgtatataaaataacaaactatccaaatatttcgctgtcttttagatgaaacttccaacaggtttaatctaactataattttattttatacattaattataaagcacaagagcttcaagctagagattaggattctttgatcataattcgattccggagagagaatgatcatacaattcgggtcatgttcgagtttcgcttacaattcaacgctcgatattagaacttgccgtcatctgtggttaacaacacacgctcgactcgcggtttcaccttttactttttacatgctttgagactggaaaacatggatttcttacatgaaattaacacaatatatattcaactactgcaacatgggttttgtattctgttttaaaaaaaaaaattcttttaacagtaaaaaaaaataaaaatatgttaatataatattaaattacaattgaattttaaactgaagtggaagatgtatcagtgtgaccaagccggttttttttctttcgaatttgctcttgctcttattagacgtcaaatctattcaatgatggtggagaggaaaaataagtagttgactttattcagtgacgtagcgtttgagtattttttgactttattcttctatcattaataacagtcgttgggtggttgtactgcggtgggaccccctctctctctctctctcttctattttgaacgaatattctagaaatttaggttcaacattttattcaaaatatttaagctaaaatattcttttttttttccttgttaaaaatagtacaatttttctgtcatttctcttaattttctttattttgggaatattgtcccaaatacatctcaaccaaaaagcatctaatcttcggaattttggtatgtgtaggggggcgggcgggcagcaagaccggttccga

SEQ ID NO: 14006 - DNA, 1248 bp, Mimulus guttatus
  Intron number 1 from transcript mgv1a011803m (locus mgv1a0 11803m.g) derived from phytozome v7.0 (chr-ID scaffold_98; pos 518204 to 519451 reverse strand)
ctcctcattcgcccaacaattcctccggccgcaaggtttactcttctagcactcaattttcatactctctgtttatttaatccaattttttttggggtatattttctgctgattcgttgtaattgaaatagttgattgcacgaattaaagcttggttatctcttgacggaattttggtagattttgctgttatgtacgatgaaatattgatatcatcacagattaatcactaccacccatgtgtttttggagacagtaaaataaaaattatttgattaagaggaaataaattaaggactggatataaggaattattgcattagattttgtgatgaaatatgactttggtctaacactaatgatttcttgttgattctacgagccctaggttattagattctaacattgttgaatgaattgaatgctgtaatctcttatatctcggaataggattgcgattttttcatgatatatttaactatttattgggataaacggtaacttctccaaaaggccttttttcgagattttaaagcgaaggagtttgactctgctcgtttcgatggtaaggctttttcattctattaattacgaaaattcttttctggttttcaaagtacattgcagcgaatttgactttgtctctaaactattgaatttcgccatccttcatttttctgacgaattgaaatcagtgtattggcataccctttgaatcctgaaagggagtcataacaaaggaattcactaactcaacataatttgcatgaatagtatccgagcgagagcatttttattttgtgttctagtgattttctggatgcaagtttctaaaactcatggagacaaataatcagctgcagtgcggaaaatacgctagagaaaaaaagaaacttgcatatttattttgaaagaatctggattgattccatatgatgcgtcgcacatgaaaaccatatatagatctagatataagaagttcttgatggtacgagttgctactcagctgttaaattttgaaacttattcgtatgagatataattccatggtatatcgtatctcctgtaagtaattgagctagatttgcttatggcaaacccgtaatacaaaatataacttaggaagtttgtagctccattacaaaagcgttttttactcctttttatttctgtcttgttgtaaaatactagagatggtatcatcttatagtcaattggctctaacatgtgttcttcgtcaggcttgct

SEQ ID NO: 14007 - DNA, 809 bp, Mimulus guttatus
  Intron number 1 from transcript mgv1a004719m (locus mgv1a0 04719m.g) derived from phytozome v7.0 (chr-ID scaffold_193 ; pos 272935 to 273743 reverse strand)
gttccttgccctttctcgttggagctccgaaatcggtatcaatttaccactaccattcttttttttgtagttcaatttattttttttggtttttcgttttcgatagaattgaattgtgtgcgtttgaaaattcataagaattcgtgtttttatgcgattcttgattttgctatttgaggttgaggttgcagattatgtttaaatgatttttagattttttttttctggattgtgtatctataggctatagactatttttcggttatcaataaagcccgatttgcagtttttgttttggtgtcaaatttactgcttcgattgtcgattattaaggatgttttggagttttcgatgcatctataatgtctgattctgtggttgtttacgtggcttataaaaagcataaatgtgatcggaaaaaaagattccattcccgtgtagcacgattctactgaaaatccagtaggagctgacggaagcttcctaagtgaaaatttgatagcataactggtaaatctcgttagttagttagacaacggaagtattaaattcatattcccttttctcccggaatgttcggtgtactttttccgattccttgtatttgttaaatgcccaatgaaattcttttcttttttggtagattgttatcatgttcgaaagcatttttcaataaggctattttgaaagaaagaaaaacgaaaaggttattttaggaactggcttaagctggcaatctctacgttgagttgattttttttgtttgaggtttgattattttgaacacttcgctttcaatctcaggtcca

SEQ ID NO: 14008 - DNA, 1514 bp, Mimulus guttatus
  Intron number 2 from transcript mgv1a021179m (locus mgv1a0 21179m.g) derived from phytozome v7.0 (chr-ID scaffold_6; pos 3888310 to 3889823)
ttctgatcgcgttctcgaagcttgtcgtctattcggtcagtggcagtgcattgtcactctttcgtttaaattttggctttttctcaccgtgaaattagcgattcatgttactgtttccgcattgtcgttggttgcatttggaattgcgtgttaacgatcgcgttatcttgcctgtgggaatctgacgttgttttttcaatttgatcttgcacttgaaatgtagttcacgtaatttttatttgtggaaattagctgatcaggcgtttctctttctctgattgatgttaacatgccaaattaatttgtgctcagagagtgtgtagttattttgatttagaatttgggattttttcttgataattgcattcaataaccccttaagataattccttcagaatgtttttaattgtgctgtctaggatcttatcgggagatatactagttgggaacatcatagtgtgttgtggatcttttctgcagactttgatgagtgtagagttcacgtgaaattaaaacttttgatgttcttagaattcggtggtgaaattctatacattatgacgtagtttaatgcggtgaaaatcgcttgatttatctaacgtcccacaccatttgttaaagactctctgattcaggtaagcaagagatgcgtttattccacattgaataaaaatgatatcaacttaataccattaatatgtaaacaaatggatcttctgatctaggttatcctaatcacaaaatttgacaaatgctatatcttaaatgagaatccgtaagtagcaaaaatggttgtcatatgttttgacgaggggatacttgtccccttgtattaattttttggttgcgatggtgggtagcggtgggtatgttcatccgtcctcacatgctacaataatcaaaacaccgatttcgcgggtaagagcctgtgaatttgtgctacctgtcttggtttttgacacgtgtatggtacgaatttctgttttttctcaaagtttagattagactaaagatcacataacacatgcatatgcaattaagttctgccgtgatgaacttgtgttgctcacatttattacgttaggagatggcaatacgatatccttctcaaactcctgcacgtgcgaatagtttgggccttatgtgattctttctccttttattcattcctattcagcgtaatttatttttttcttcctttagtggaaaatacttttttttttttttttccattattcatgagttgtaggtgaggatgtatcttttgtagctatttaacattacgcttatgcatttcccatggtataatcttctcaatgataaattgctatccttgtgtatcttttgaaaggagaaatgtatctttttttgccaattatttgatgtccaaatttttgtagataaattggaagaacttgaacatcaaatatcatgatctttccatacatgcttttaaaatatatttttatttttttcactggtctgattctgttttggcttatttgcatgcagca

SEQ ID NO: 14009 - DNA, 1381 bp, Mimulus guttatus
  Intron number 1 from transcript mgv1a003875m (locus mgv1a0 03875m.g) derived from phytozome v7.0 (chr-ID scaffold_32; pos 741022 to 742402)
cggtaagtggattggattctctctttgttttttccgtttcacatttccccaatttccccaatttttccaatttctaatttatatactctcattgatggaaattgaaaacctgaagtgcttaattattgtgattttaagattgaaagcgacttcaacttgtgatgattttaacacttcatttttccctaggattgagtaccgattacgtttggtacttctcaatcatctgaaaaccgataatttttagagcactttactttttgtttgctgctatcgtgttttcggattggagtgtgtatcaatttaagcatctgtagttgaggcatgccactgtgtgtttttagatctctttcagtgaagacaatgtgttgtttcagtttatcagatgtcgcactcgtctcttcatagtggagccccctcttatcggtggataacctatttctaaccagtatatctctgctagttgtcgattgttgaactcgattcattaactgcaaatattacgtttcacatgccagaatttttcactggtgtggatttgttgcaatacgtgttaattagtttattgttaacagttaagtgcaccttatttataaaagaaaacttgttttctaatctgaatgtggtagaaaccactggttgggttggttacgaggacttgaatactttagttgacctgaaataataatgtgttagtgatgtaggatgctttagtattgggagaaagcagtgagtttatatcccaaatcaccaattagtcttatactaccaagctgtttatctaataaaaaaaatcgtatttatattcgttgcaaatgtaggatggtagccatgtttttaatattttcagatgtctgtgatcatatttatgagctctcttttggcatcaattaccatcaatagattataattgctcaacctgattgtttggataattgattaaacagaataataagacggagttgcttaatacaactatgagagtcaaagtctgtagatgccataatcagctctacgaaaccattaaaatattttaggaaagattgcatcttcaagtaaactttttttctaatatatcctctcacttaagttactaatatgacgccactccctccaacccataacatatttccagtactggatactgaaggcatacaataatggggattttcgctgtcagataaacacatggaaaatattattattaagccatttgatgttcagcaatgtactttttcagtactgcacatatgtatgctaatatgtatatgtatgcacgttcatatgctggtgagaaaaatatctgcgactatctagttttattcgtcatccaataaatgcttttaatcgaagtctttaaatcaatacagatatctactat

SEQ ID NO: 14010 - DNA, 782 bp, Mimulus guttatus
  Intron number 4 from transcript mgv1a005573m (locus mgv1a0 05550m.g) derived from phytozome v7.0 (chr-ID scaffold_42; pos 727412 to 728193 reverse strand)
cagctgttaaagagtaggtgtttccttgcccatttattctgattttatatcatgtcttgtctaggcagtgtggataagtcttataccctcttagatccactttattcttgggcaactacgaaaagaatttatggggctaatagtgacaagaattcaattatgagactgggcaggaacattaaaagaaacatggtcgaagattttgaattagattaagatagaggtacaacagactgatgccttcaaagaggctttttagttgaccggcagcaacaaatattttttgttcattctgcagtctaggacttgttagatttattaaatcaggatgtcttaaggattgtgatccattttattaaatcgttgtgaaattttcaatacatgaacagaagagttttcataaaatcaagctatgaacttggggttattcttgtacagagttttatcaaactcggcgttgttgcaagagcttgtattttgttattcttaattagtcaatctagaagggtgtattagtttctgatattgcttactaaaatttggccttaaaaggtggttattgtttgtggaagttcaagatgagctgagggtcatggtttaacaaataggatataaaaacctttagtcctggaaattagatgttattattgcacttgttgaaatgtttttggctcacttctcaattcctgcaatgaccgataaatggcatcttttatttttgattgttcttcgttttcatgggtgcagctatacaagacggtttgacaaagttgaactagaca

SEQ ID NO: 14011 - DNA, 639 bp, Mimulus guttatus
  Intron number 38 from transcript mgv1a000086m (locus mgv1a 000086m.g) derived from phytozome v7.0 (chr-ID scaffold_33 ; pos 1215814 to 1216452)
tcgtgggtatacttaccaaggtgaggatcctgcaaattactaaatcgtgttcttacgcccataagctgataggaatttcctgtattactgtctgaaaggtctattgtgactctctgaaatatatgaagacacgtacgtagtattctttgaatttaattgtttcagatgttattgttgctatgataattgacgcattatttaagcttttcttagttgtagtgacttgttccttcacatgaaactaagcagttgtatgttcgtgttgagtagttgttatttctgactaaaaaaactaagtgttattgacaagtgctagaagtttaggtctttatatttattaataagatataaatttctgcctgtttagtagtttttatctatctcaattgttggaaaaatgtagatttgagattttggcctccagccaccgtcaaactcctttttccgaccaaaaatcgttgactagacccctattgttttacctattatttttctgctgtctatatgattatttttgtttggcattcctacacttatgtctggttattataatcggtttggtttattttaatctgctttgcttttctatataatattctgtctgatcccaactttgctattctaataaggtttggcctt

SEQ ID NO: 14012 - DNA, 2549 bp, Mimulus guttatus
  Intron number 3 from transcript mgv1a017885m (locus mgv1a0 17885m.g) derived from phytozome v7.0 (chr-ID scaffold_84; pos 392840 to 395388 reverse strand)
cgaaccttttgttgttaaagaccatcgcggcgaatgtcagtctctctctctctctacttgcgcttttcttattttattttattttatttttcgttaccgttagcgttatcgatataaatatataatttttgaaattaaagaattacaccaaagtttagttaactaagtaaatacttatacaattaataatcaaatgaagaaaactagtactccatatatactagtcgtggatttaaatatttgttgctttatttcttaatcacaagaaacattttttttttctatttgattttagattcttatccgcgttttatttgatcaaatccaattaattgcgttgacttgtcttggtgttgacctcttcttgtctttgatcaagttattattatataagatgatagtacattaaccgtattttataaaaatgaaataaaaaatgaaagaatattctatattatggactgaatcatagttttcttaggcatttctcaatagcatagattaaattatattagctacatttctaataattaattaatgcattaaaaaaaataatctagcggttagaggaagagggtctgttgattgaagtttgtatctctttgtcaattactattacgtcaaacgtgtcttacattattggcctagtgtagtttacagatatttgattgcgggtcccctctttatgtttatagataacaaaattagaataaactaattaattattcaattatatcaatcataagtatctgtatgacaattagatttcctcacctacttttaatttgtcacaagattttgataaaacctaattttgtagttagttaaggtgttctcacattaggatttggtgttaaatttctaaatctagtactaaatatgatgtctatttcatatatttccaaatttaataattaaggacaataatattttttttagtcaatcttgcaaaattaattgggtagtacgaggaaggcccactttgattttattggatagtcgtatctaatataattagggattttaattttatttttttctcgaatgactctaaatcttgtcaattataaggccattttaaaaatattatttttacccatattaataaattaacccttgttatatatacagtcaaattgacgtaacaactaagaaaagcaatcaaataatatattccttttttttttttttgaaataatcaaataatagattcaattaaaccaataatattattatgagtataaacaacgcaagtggagtcaacacaccgcgttcattacaaaccgaccttagatatatcatcgtcccataactaattctaattgtttatttttttggtcaaagcaatttataaggagaagagaatacatattatattagacaagttgagataaatattaaatgacttccaatcattatctatttatagggtgaattgcattttgcaccttgaaaataacatggattagcactttgcacccttaagttttaaaattgtcaaattgcaccctgtaattgcatatggtcaaatgcaccccacacccatcgcttttcttggtggtgtttttttcttttaatatatatttttacattattatttaataatattataaatgaaacacaaatgttgatttttcgtatcaaaattgaaattttacatgaactaaaaagaaaagatttttttgtgatacaattatatatatatatatatttttaaataattcaaaaggttgtaagttgtgctccaaagagcatctaacattattaacattaatatttatatgacatattttatatgatttattctaattttttaaatcacaacaatcgattattagtctagttacattctaaacacaggttttatgttttaatattgtttgtataaataggctttgtttgtcctaattgaattttcataacttttgtcaaaaaatactgaaactttaaaattttaaaatatcatgatatatcatatttttataaaatatcacaagaaacgtttatacgatgcattttgtcatgagatattcaatttgagggtgcattctgtcaattctaaaatttaagggtgcaaaacgtcaattcattccatttttaaggtgcaaaatgcaaatcacccgctacttatattaagtggaattatttatcgagtcaacccaaatacaaaacttgtactcttgctctgtatatctagtcatcttttgctttcaaaatgtataaagaattaagtcaaatcgaatttttctgctcaaccaacttattaaccttcaataaatcatccatccatttcaaataaatggcaatttggatttaaaaaaactattatatgacaatgtataattctatacagtagaaactcgataaattaataacctcgtttaaataataagtttctcgtttaaattaacatttcagtaaattagtagaatttggttggtcccgattattttgatttatagaggtttaactgtacaacgtggttagtaattaattattttgaattgtgattagtgtacaagaagcatcacccaccagcactagaggat

SEQ ID NO: 14013 - DNA, 971 bp, Mimulus guttatus
  Intron number 1 from transcript mgv1a026348m (locus mgv1a0 26348m.g) derived from phytozome v7.0 (chr-ID scaffold_108 8; pos 11235 to 12205)
gcgtcgagtttgagatcgacaaaatccctgggtttgccccctactctctctctctctctctctctctctctctctctgattttgcaattcggtgttatttcaatttgttgtttggttgcttttcgatttggttgaatccacgaagaattaaatcaatcaatattggataactgttgttgatatggaaatcagaataaaccctctgttatgatcagagattacataactaacataattttgttgaacacaaatatataaaaactcaatataacttcatcctgtttttcatttttttttgttggtttctttgactcacttcaatggcttcattggatagtaaatttgaactattggcgtcgaattgaagaaggtggaactgttgttacttcttctcgtcgaatctttaacaattacaacaattatatatctatgctccaggcttatagcgtaatatttaccaataattcgtagattttccgctaatgatcaataaatttgggtgtgtcctgttaatgttaattccaatatgatcatccttctagtgctcttcttgatgcctcgatagtttgtcgaaacgtttgcatggtttatctattctgtcgggcgactttgaagctaaatttcaggctttatggtccgtatttaatgtttttttcttacatgatatatattattttggttaggaattgaattttcgtttattctttgaaggtaaaaagtcaagacaagataaaaatttgtacaataattcagtttaattcttattttccattttttatcgcaactaccctacgaaatcagtgaaagtgattttccataaaatcattttcgttactatttttcttaagaaccattttccttttcctcatttcgaaatccatgaacccaacgaagcctataagtaatatattgtacactgataatcataaatgggtttttcgtgttttacactcacaggaatcaaggtggga

SEQ ID NO: 14014 - DNA, 2010 bp, Mimulus guttatus
  Intron number 1 from transcript mgv1a002975m (locus mgv1a0 02975m.g) derived from phytozome v7.0 (chr-ID scaffold_26; pos 209829 to 211838)
ccttagctctgtgcatcactcacgaactcaagcccgtatgaatctcctattgcatcaatttttcgcattgcatttccattaatcattccatataatctgatagagatctgtccggatcgatattttttatttagtaagcttctcgtacgtttgatttgcagtgattttttatttatttatttgtttttttctgatggaaatttaattttgttttggttttctcgattgaaatgttttgcaatgttgctgttgtgcttctgttaatgcatttgtgtgatgaattttgtatgttttgggaagctttggttttggagatctgccttcagggagctgtgatttcgatcaattaattgaagggaattaaattttgtttctgttaagcattttcttatgtgtagatttgattttttatggttataatctagggaaagagttgtaaatggtgaattatgctatttgagaaaggaatctatgtgttatccaacttctatcgaacagtatgtaataagtcgtacccataattaccaataacttgctattaatttggctgattagtgaaattaagcaattacgtgcctaagatgttgttagataatattatcgactagattacaatgttctcgatctaaagtttactccaaaaactctttatttctgcaaaaatattggagctaattgtaaatcttgcttgcagtttgattacccctgtaattttattctcgattaacagtctaccggaccttcgaatatcgtagttctaataattacaactagacttcgaaaacaatgggtgggtaggtgataatatagcagcagattttttgtcggtagaaattattgttattcgtagattgtcattaaaagaatatcctgaagttcaaagcgaattgcctccaatacatgtgattgtgttgaatatctcacttctctttacttctgtatgcagtttaagtttaattccctcactaaattttgtgcaaaaaaaatagtttcagttattgattatacggttttcttgatgtggcataacctatcaaattagtgttgcttaaggaaacaacattgcatcagctctttgggacagtatccagtaactctcttggaacttgggatatactttacttaatctatttactattaccagtgttctaaaaatcggccgaggcggccgattaatcggtctccgaggcggaggcggtccaaaacctttacgattttagtgtaaaggtttgaaaaatcggttttttgcctgtgaggcagttttaggcggtctgaggcggtccgaggcggtcaaacctttaaggcgggtcaaactcggtggcaaaaatcggttaaaaatcggttttttttttttttttttttttttttttttttttaaatttaaaataaaagttggattttaataaaaaaaaatatgagttttatgccttattttgtttatgttaattgttattgttaaaaactaatgatgtatgccaggaatgttcaagaataaatgtaaattcaaaaaaattgtttttttatttatattttataaggatatttatgtattatgacttatgattattaaacttttattatgttattaggatatatacatgatggagatataactatgtttaaatatctttttatatatgtttggagtatttataaataatatttagaaatatattatattaaattttaaaaaccgatttatttccgatttatcaccgattaatcaccgccgcaccgattaatcatgagtcggtgcctggccgactcggacccgattaccgctttttataaccttgactattacacgtttgataaacatatctgacagaattaacgtaagagatcatctttttagtgaataattttgtattctaggcatctttactgatgggagttctttggttttttatgaacctagttctaataaatgggatttatcctggagttcctcatgaagtttccgttgatgttgcagataatttcacagtccagtattacctaaattgtaaa

SEQ ID NO: 14015 - DNA, 387 bp, Mimulus guttatus
  Intron number 1 from transcript mgv1a010655m (locus mgv1a0 10655m.g) derived from phytozome v7.0 (chr-ID scaffold_142 ; pos 39656 to 40042 reverse strand)
caactttttaacagagggcttctcggaccaaagtgagttcgttcaatcaatccatttttcaagtcgaattattatccctaattccgaagaatgaaaattgaaaatctcgatttttttttttgatcttcattagggtttgtagtccatcttttgtttcacaatactattgtctaaaaatcggatctttccgatatatgaattgggtctgtgtaagattctgttattttcttgtttttttttttggacaaataaaaactatgggctttcctgcatatagaatgaattattaatctgttattttctagttggaggaatccagtttcagaattgattataatattagtgttaattgtagatatttttaatctgttgtttttgtagtaaaac

SEQ ID NO: 14016 - DNA, 1433 bp, Mimulus guttatus
  Intron number 3 from transcript mgv1a019343m (locus mgv1a0 19343m.g) derived from phytozome v7.0 (chr-ID scaffold_16; pos 245446 to 246878 reverse strand)
acaacttgagaatttgaaactaactgtaataaaaggtatgtgttcttctccggcgtttcctcggacactgaaaaagttaaacttgggaggtggtcgttgttaagtatatatttttatactttatcgtacctttttatttgagcttttggtgtgatttaacgataattggtgcgtaaaaagttgatttattgtattttaggtataaattgaagaattggaaaagtttggggacaaactgcaattttggagaaaatatgggccaaaagtgaaataatcaaaaatctgaagaaattggcacgggacggccgtcccaaatttacacctaaaaatgggacggccgtgccaaatgcagaaatttggcagaaggtttcggcgattctcgcgcggccgtgtgagaattgcactgattttcgcgcggccgtgccaacacacgctggagacaattttggacttttaatcacacaaggaaacctaaaatcatctaccaagttgggacatctatttaagcccaaaccaaacacgaattagagggacttttgacacaaccttggagcgagagtagcgagagaacgaagaatcgaaaacggagaattgacaaattttcatcagaattcttctttcacctatcttttcttaatctatttctttttatatttttattatgtttttcgtagagaacatgcgtagctaagtttttaatctaggattttattggaaccctatgtagggatggtgaacccgttttcttgagattatgcaattatgattttatgattatttcttctacttgttatgattgttagtgcatgaacttgatcaatttatgtgttttatctgtgattattgggattgactcgacagagctattttgataattagacggtaagtataagaatcttcgagtagtttttaccggatgagtgtgtcaattgcatgtggtgtcgtagacatacagatatcaccttaggtagccatttacgagacttgttagttaatgctttattcataatttgtttgcatagacatatagtgaaccgtttatgaataatagactcataatacacgcgacagctggttatgagtaaattagtgtctcaggttaataatcatgaatcatatatttcataattgaggggttttgggtgagcaattcttgcatagggggaagataaaatcctaggtccgtttatattgatattttctcgtgtttatttgctttcataattagtttaattatttagttgattatatttgacaactttgcgtaggctggatcaaaatcataattgttagaatttggtacttaggattagataatttgagtattccctgtgggatggacatccgactctcacgagtccacttttactacttgtttgcgatacgtgcacttgcgtgttaggtatttagcacccaacagtcgccgacttcct

SEQ ID NO: 14017 - DNA, 1587 bp, Mimulus guttatus
  Intron number 1 from transcript mgv1a012782m (locus mgv1a0 12495m.g) derived from phytozome v7.0 (chr-ID scaffold_55; pos 112033 to 113619)
gatcccctttccgcaaagaactcctcaccccgtacttactctctctctctctctctctctctctctctctctctctctctctctctctctctctctctctctctctctctctctctctctctctctctctctctctctctctctctctttatttgtttatttatttatttatatttaaataatggtgttgtggccttgtgggtgtttgatcagttatcatatgcaatttttgcttcacggaatgattttatttacaattttagaactgccattaaattcttttattttttagctggaaagttgggttggtgatcatcattttcactctattattctatttatttacgtgtataaatttacaaaaatataaaaaaaaaataagtattttgtgggattgctaaattgtcttatattattgatttatttatttctttgaccaatatttgattgtagatttttttgtgatagcatccactaggagtgttcacttggtcggtaaaacaacccaaccgtaccgaaccggaaatttggttcggtattcggtaattttcttttttaaatttccggtattcttacaggattcggaattgatgcccggtataccgtactgttccaaataccgaaatatttaatagatatttatttatttattcttttattttagggtaaattacaactaccccttaggtatggtcaaattacaaaaaccccttcttgtttggataattgcaaccaccccctcaactcctcaaatttagtggaatctttgagattataaggaatattatcacttttgtacccgttttatcccattcgaagtctacattttgaagcaagatgatcataatatgtgtttttgggcttgtatatataagattgtggtgcatcagaaactgtatttttacacaaaacgagtacaaactacattccatgaaatctagatgcttatgtggaatttgacaccataagggtggtggtgtaagaaaaaaatcatatttgaggggtagatgtaattatccaaacaagagggtttttttttgtaaattgaccatacatacctcaggggtgtttgtaatttaccctttattttaaataaggttataataaattataaaatacttatagattgataattttttccatatttacaaattagcctattgataatcactttttcttttagggacgattattgaaattcgacaatttgaatgtcaaattcaagaattagtttctttaaatattttttttatattttttaaataagaaagtatattttcgattttactaaaaaccaaattaattcagtaaaaagcagtaccggttcggtacggttttaccgaatgaacactcctagcatctactgcacttatctatgatttctgtacaatcataatttcaacatacacctaactgcataatttgttctattggaaagatgaaatatagctagctaatatagtattggcttacttgttccaaaaaaatccgagtcatctaatgttttctattttgctatactatttcgaattcggcaaaaaaaaaaaaaaaaaaaaaattgattgataatttttccgatgcaggtgg

SEQ ID NO: 14018 - DNA, 985 bp, Mimulus guttatus
  Intron number 1 from transcript mgv1a017345m (locus mgv1a0 17345m.g) derived from phytozome v7.0 (chr-ID scaffold_75; pos 404124 to 405108)
gagaaatccatcgcggaagagctctctctacatcggtacatgctgtgtttgttcattttttgcatttcttctctttgtttatttgtattgattcagctagggtttccacaatcgtttgttttaactgcggctttggggtttgtcttactgtttttatggttgattttctgagtttatagaccttacgacagccgttgatccggatttagggatttgacgggtttccaaatgcttagtattctcgtttgtttattggtaataatgggatttattccgcgagcggctgattattctggatttaaatgttgagaagagaacttttccgattctggttttcaatttgttgaaaatttgaatttttatatgattatataaaacccacataagagttctgtggttttgaattttggatctattgggttgtttattcttgagattttcgaatatgctttgctacgttctctcgttggatttatttaatcggttctgttattatcggccgaagtgatctgttgcatatgggacgagaagagctgcgaaaatacatgaaaatgtgatgcctctttgcatatgtgattgtgtctaatgtgatttggtaaatgtttgtttctgtatgacttttggatttgaaaacctcgtcgaatatattattctgtgggttttttgtttgtgttattattgggtcttctcttaattagttttcatgaagaatcgtatatgttttttgtgcttggtagattagacacgccttgctaaaataccgttttccgtttcccaatctgtccagcaagtagtgatttatgtcatcttatcttgttatgtcttgcttcgttttcattatttcttgaaccaagctttcccagcaagcccgcaattttaaaactcagtctcgaggtcatgatcatgggtaatttgttaaaacttgatttcaatttagcagttttggaaaaacttgatttcaattttgcagttttggaagcgaaaa

SEQ ID NO: 14019 - DNA, 2210 bp, Mimulus guttatus
  Intron number 1 from transcript mgv1a019902m (locus mgv1a0 19902m.g) derived from phytozome v7.0 (chr-ID scaffold_242 ; pos 122914 to 125123)
caacagcaatctggtgtgtttaatttttcgcacttgctccgttttattgtttgcgattttattgtttgtttgtttgattgattacgcttctgttttgagtttaatttcatctttttttttttttgattgaggtggtgttttgatctagttggagtgtgtttcttatagttcttctttgaatgttaatggttccactttttatttgcaatttgagatcttggattttggaggaatcgttgtcaaattaatcaagggaaagttggacagtgtttggagggtcaatctatgaagtttcgaagcctttgaattggttttaagatggtggtttctaaagaatgttgaattgctctattttgatttatttattattgtagtttgtactggatttgccttttgtttgcgcctatgtggtgaggtttgaagttcatttatctgttcatagtcaacataatgttggtgaagccgtaacttgtagtgcgctcggaatagttatatcatgcatgcaagtggcacggactgtatattgagatccgagctaaactgttttagtttaatttccattatttgtgttttttttgttaatttgaagagtaccattttagggagttaacttagtgatgatatgagtatgcaaagttctcaaaaaggctgcttgataatgaatgcttttgcgaccataagttggagtttcttaatgagtgattactgttaacgaaaatgttgaatgcaacaaaaatttggagtaattgattccttctaaattatatcttttttgcgaccttgatgagtaattgatcctaagatcataagttatgccacatcaattaatttagtgctgtttgttcacccaacagacaacctaaactgttttttgtgctattatttgttcaaatcagagctctaattgtcttgtttcgatataatgcttggtgtgatggtaaatagtagaatcacagattgcatttctcttggatattctaaacatcttaaagactaaatgactagcacttgtgtttcgttttgtttttgataataaattgcaattaactatgtaaaatagatttaaggctggtttaagtttattgtcactagaattgagaggaaggtgcaaaacaaatttgaacaagatttacgtcaaatgaagacagaggcagaatgagatagatgagtttgtaagaagttcaaatatatcggcagcacttcagtttctaaacatttaatctcttagatcatgaaatgctgacatgttccgctgaaaatataaatggttgacagagaagtcgctagctgcatgatactcagtttactataagccatacattttgcatatgataggccttaaccaatctgatcattgagtctgaagaatcttcgattagtagagagatatcctgaattagtatataatattaatatttatgacactccccaaaaacataacctacgtaaatacgtaactttcatctctgcacctctgattagtagtctggattcttaccatttctgaagtattttaactttctaaaatttgataatgtattaattctcctgcaaacttttgaatgtctaaatcttcagttggacatttgccacttgccttactcgtatattctcagtagttaggcatggttgaccttaggtaattatataagaccttttattatatattacgtattgttatcatcagctccttatgagtttcattacataatttgaatctactaccagcaaagcactggaggtaactatgattatccttattatctcggttgctcataaatcatatcagaaaactcacatttgcaccaggaagttcttttatatcattggtctgcgagattgcagtgactctaaaacttccatgttcttcaacttgcactatttggaatatcataagtcgaaccctcttagaaaacttgcatgttgaaaggaaaattatggaaaaccaattggtttgtagcagtttcttttcctgtcggaattgttaatgttgctagttggtgttatcatagttgaatgctaccgtgctctgcttgatgaagtattgttactgagccttttcctggaaactgaatagttcttatgctcaatatctgaggtcataaagtaaacaaatattctatttgacagacatggattctttttcatatatataagtggatgcagttaggctaaattttaattgaataaatgcatcctctctttgcagg

SEQ ID NO: 14020 - DNA, 1567 bp, Mimulus guttatus
  Intron number 1 from transcript mgv1a009923m (locus mgv1a0 09923m.g) derived from phytozome v7.0 (chr-ID scaffold_251 ; pos 76138 to 77704)
atccaaacaaattcaggtactttacataaatcttcttctcgatctctcaaaacaaaatatatgtatatatatatatcatgcaagacatatattattcaattagtttaattaaggttgtttttaattaataagatatatagtactatataacatagtattttgttacgtgcaataattattaatatggatataaataaaagaaaaagaaaaaagaaatattagttattgcgtataccgttggaaatacctcttttattaggacaagctttatggaagtggtgtagaatggggtcaattgcagactagtgaaaaaaaaataatctagttccaggttgttccttgttcttcttgcactattagtactataaccccaaaaaataatatatatatatttgaattaaaattctttgacagaaattgccagcgtaacattgtttggcttctttcattcattatattcaccatcttagattcttatattcttcatatttaatttttaataatcatttaattctaaaattgcattactttagaacccttgtacgtaatatttgaaaaatatataattattttaatatttatatttaatatagaactcgggtcatctcaaaactttgttcacttcttcttcccacttgtactaatcatcacattagtagtttattattggtggattgataggattttaaactaattttgttataaacaaataagtgtagcaattagtattatggttttgtttaaggaagaatcatggtattgtagttgtaggcaactcttattgtgtctattttaattatattcacatgggattttaaggtgattaccaatagaaatgatcctcggtttaagttaattattacttgttagtttaaactttaaacttgtccgaaaagactgagttaccaattgggaattgacattaattaaatatgaattagtgttaatgagtggggttaagtgcttgtttgaattctataagtattccctgatctcataatcaaccacgtatcagttaaaaaaaataaagttattatagtttaattaattaaataggaaatcatgcgaccaacaaaaaataaaagtgaataaatgttagaaatgtgcaaattggtattatagctttagctttctgatcagtcttttttaacagagtctgcagtttcaggattaaatgcattaattcatcggcctgtagagaaaagaatgaatgaatttagatatagaattcaaacagtggaaatggatagatatgaatattatacagtataatatgtaccctttttcagttcttcttacacactaaataaaaataattaaataaataattaaggccgggtgacaagtctgaaatctgattcgaccaatcaaatcaaaagatttatttattaaaaagaaaaaaagaacatgacaaagttcccataaatgggggaaaacccaagtgacaatttttaccatatctgacagtttttaccattaattaccatatattgtatgtattaaaataataataaaaaaatattgggggttaggtgtgcagtgggtgaatacgtggcagcggttagag

SEQ ID NO: 14021 - DNA, 1342 bp, Mimulus guttatus
  Intron number 1 from transcript mgv1a016491m (locus mgv1a0 16491m.g) derived from phytozome v7.0 (chr-ID scaffold_18; pos 1741258 to 1742599)
tgactgcagctcggccaagcgcggcggcgatctcggtatgggaaatcactttttttttttattccttctggttttgttatgtaacttgatggattggatgctgaaatataaatcagtaattgtaattgtaatttatttaggtttaatttcttgtggcattgtatgatttgacttttgctgctagaattctttgaaatttatggttgaggattttgacctagaagctatattgagagcggtactgttcaccattccctgcagataaatacacgacgtgaaagaagtttcattaattgttttgtttgtgcttcatttcggaaataaatatttgaaaattattatactttttgatagtttctatttgatttaaaaaaaataaaagggataatgtttgaaataaccaattgaatactggaattgaaagaattatttaaggactaatcttcccatgcgtatttcatttcatatttgatgtgtttgatcctttatacaatcatctctggagtggagattatttaccaaattgaatttggtcaaatgtcaaatattatgtatcatttatgtgcagttaaaggtaaagaatatttgtattacatgtgacgattaagaggatatgtactatagagtagggcttatggaaagtagaaagccgtgattttctctacgcatttatgttctctttgtagtccaagatggctgcgactgatagtctgtggatggttggtgatttttgtgtttgtcattttaatgtcatgatgcttttctgtcgtgatgcaagtatactttattttaagctttagaaactgtccttcactttgcattactatccagatcacctgcttcatcgtttaatggtttaatgccgtttactgtagaaacctatttgatttttagctttcttctcatgagtagtctgcaatattttctcccatttgcgaatttcgtcagctgctcttagataagttcccttgctcaatgttctaccacattctcattgtttatatatgaagtcagtaaatttcttcagtctttctaccttctgcatttgctgtggcatcatcggatttcacgcttatcattgtgcacaaagtaaccgtttggaataggaagcatattttccctttttttacgagaatcggttatcatttcaagtatttgggttattgctaccatgttcgtattgttgtcattccatgggcatgaactgcataaactctcttaaatgatgtcgtcttccagttattactgaaaagtgctggtttatggttcttcttgtaccacgaaattcgtaattggaagaatctcattatgtatgttctcaggtccgtttggccgtggtcag

SEQ ID NO: 14022 - DNA, 2069 bp, Mimulus guttatus
  Intron number 6 from transcript mgv1a000784m (locus mgv1a0 00784m.g) derived from phytozome v7.0 (chr-ID scaffold_2; pos 2465685 to 2467753 reverse strand)
gggagaagccttctgagttgctgactcctttggaggtgagtgattttcttgatgtgctgcttttcagaaatcatgagtaacatctatttattttttggatcactatttttgttctgctgcgttcttgtgcaaatttgtcctattctgtagacattaaagttgtagacttgtttaaattgttcaaaattgtttatgtgtattattgtttatatgcatgtccttccactggtttgtagatgtcatggcaagccaggggaatataacgactgctctttgtcctcactttcaaggcggtttcactttctcgaggcaggcaacaaattgctatttatatttcatgtgcaattttggatttaatttagtgataatctctcgatgctgctgttgcctgccattactagaacagtatgtgcactatcacttgtttgacttgaggagcatgatgcatatttttctgaagtattattacctatggataatagacgatatgcgccctactagttgtctaagttgggaagctaatatgcatgttttgttaagttcagttatttattaaaacatgtttgagtctttctcatttgaaagattctccagtaattggtttggttccttgtatgttgtgattttgatacttaagaggtgcacctactgttaggtttctttcagcctgcataacttggagtcccatccatccaagtgtatatatatttcatgcgattttccaattatccagctgctatttacttgtgagatttttgtttattctggttctaattattttttttccgtagttcaaaactcagtatgagtggtctccataggtgttgcgatatctgtttttggatttaccattttgtatggatttataaatattgttggtttggttgatttgatggtacactgcctctctcatgcattcctttaacgaggtctacaggtactgagcaaaaagttatgagattttttcggatgtaatatattggatacttttgttaaactctgtgaaaactagtggggaagggcttgttttgacaaaaagaccatgataactagctacaagcatattgttcttgttgtgctaagatccgcttcatagtcttagtattattgctgttattatccatgcacttatgattctggtaattatgcatattagctctataagtatgcatcgaatgtcccatctcaattaacatgacttgatcgtgcagatatcttgttttggtaaaatttctttttttgtttctatttactttctcagaatgttttgatctgtgaacttggatatctgcaccttataagctttaacctttgaatttggtgttatgctttttatatgaacaattggaatttattaggatatacatttataggaacattgtatgatgaaattagcgtgttaatgatgaatggctgaagcctgaaaagtatatataggctatgtaatatttcactgcttgttgggaatgagaaggaataatggtaaataatctagcacggaaactgtaaacagcacagcggctggttctggcctgtatctggtaaatgttgagaaatgtttctgttgctagtaacttgtggttgaacattaaaatagaagtagagtatagttaagatcttagagttagagtaaatttatttcagtgaacgcaagaaattcattcataaagtaaataaaggtaataaacttcaggcacattattggaactaggaacagcaaattcattccacacacctgaaccttagtgaagagtatagaagcagtcctggattgggctgagattagttaaatagaaatcctgcaagtaggtttttccttacgttgtgcagtattggatcactttaggctgctgaattgtttacgacttgttgatgcctttgtttctgttttattcctcaaaatatttgacatctggaagcctttgtagcattttatatttagttttgtataccatgttataccatccatttcttaattttatcctgctttatgaatctccaagtgagccttttctacgctgtgagtgagaacttatctgactgaaaacttctgttttgacagagagctg

SEQ ID NO: 14023 - DNA, 1124 bp, Mimulus guttatus
  Intron number 1 from transcript mgv1a021117m (locus mgv1a0 21117m.g) derived from phytozome v7.0 (chr-ID scaffold_167 ; pos 246327 to 247450)
acacctaaactcgtgggaggtgagtgcaattacgggtgaattgcgttttgcaccttgaaaataacatggattggtgctttgcatccttaaattttgaaattggcaaattgcaccctcgaattgcatatctaatggcaaaatgcatcatacacctcttttgtggtgtttatttttattactttgtatttctaaattattatttaattatattataaatgaaacacaaaggaagaagtaatgattattatttttgttagttatttttttcttttttttatcaaaatcggaattatatatgattaataaaaaatgatataaagctaattttaaaaaaaaatcaaaaagttggaatttatgctacgaaaaacatgtaaattattaacattagtatttatgttacatactttaggtgatttattctaattttttaaatctaaataattgattaattgtctagttacattctaaagtcaaattttatgttattttaatattgtttgtacaagaagcttttgtttgtcctacttaaattctcataatttttttttaaatactaataattgtaaatattaaaatatcatgatatatttatcttttggttagcatctcacaaagaacaattataggtacataattttgccatgagatatgcaatttgagtgtgaattttgccaattgaaaaatcaaagggtgcagagcgtcaatccatgtcatttatgggtgcaaaatgcaattacctttgtaaattgttttccatgtaacaaataaatgactcacattttcaatcaccctaagtagtatgctttttcatgtgtttgagctcttattacatcatgaaaaataagccttcttcttcacttttttcacactaaatagcttctctctttattttcacaaaccataaaagtaatataatttattccattttaattagtgttatataatttacatgaaaaatctacaaagaaatgctcaaattcagacaatttatttatgccatactatcaacaatttctatagtcatcttcattttcttgatttccttcacaacccaatacaaaactattataaccactccccctaaaaaagactcatctaatcatcaattcaccctcttaatcgga

SEQ ID NO: 14024 - DNA, 793 bp, Mimulus guttatus
  Intron number 8 from transcript mgv1a000902m (locus mgv1a0 00902m.g) derived from phytozome v7.0 (chr-ID scaffold_2; pos 2646397 to 2647189 reverse strand)
gtgccagagtttcttgcaagttcatctctttattggtatatataacatatgtctggtaatcctcccaaaaatttctccgggtcacacttattctcgtcttttgggtgaaaaagggttcgcaagttctgtttctttgtcttattacgcccgatatgctgatttatgtatttgagcttgctatgctactttctcatttaactatattactgacgatctgtttttgtcagtatgtaccttggttcatttggtagagggccataccttttatgagagactggcttgctctgaatgttttgcacacatatctgaattatctcattttttggttaaacagtcagcagtcaccctatccacgaatgttcttctatatcgtatttttattcattgggtctctgtaaaggttaaagttaaccaagataccatagttcttggttttgcttgtcgatgattaatgctaagctgaaagcctttgaaaagttaccacgttacttggcactggactgtatgatctcttttgaactttgaagaatacttaagtacataacttttgaactttgaagaatggttaagtacataactgtaattttgtaaagattttctattaaacattggttagatggacagccattttaattattcctccctgttcaaatttgtttaggtagaaagcatggaaacatcgataagtggatctcatgtttcagagcctgggatttctgaaacatccacaagtgtcatacaggatgcatccatggatgattcgtcaagtgtgttttctcaatctcacagactc

SEQ ID NO: 14025 - DNA, 1848 bp, Mimulus guttatus
  Intron number 2 from transcript mgv1a014269m (locus mgv1a0 14269m.g) derived from phytozome v7.0 (chr-ID scaffold_121 ; pos 365793 to 367640)
attcgcttcacccgagtataactactccatcaccggtacgaaatcataacctttaatttatctcatcgaaaattttatttttattttttcgacttgaaattatgtattcaatgttatgctctgtgagttgctattgaatttcttctaatagaactttatcgtatttacttttactatggttaatgtttcgttgtgttggttggggaggatttagacgaacctattcgatttgggagattgcattttagtttcggtaaatcacgaaaaaaaaattctcatgtttggttaattacaaccacccctctactatgaatctttttccatgtccatcgttgcagagtcaaatttaatgaaattttttagattatgtggaatattctccagtttatacccgttttacccaattcgagctccacattttgaaacaagatgattataagatgtgtttggcttataaatatcagattgtggtgcgaaactgcatttttaatgcacaaaacgagtacaaactagagaacattcaataagaatgaacacgtaagaaaattcatagttgaaggggtggttgtaattactgagtttttttcgtaatttgattctacctcagtgagtggccgtaatttacacttttgttccaacggttatatagagtgatcccgaaaagtggttaacaacaagatagaaagaaagaaagaaaacagacggacgaccggtaatttggtagtgatctgctgctactcttccccactattaattaaaatctcctataaagttgatgacaataaaacaaaacttagtggaagcgcctttttcttttcgttttaaacaactctaaagtagccactgcagctgtatgcttaatgattaccgaaattatcgagggtaatttgcttacgagtatctagaagtttccggaagacatgattagtttgctccagtatatatgatctgaaagaatccggtcaagccttacatctttcgttttctggatagtttgatgtaattagttgaagatagataaaaacaagcaatcatcgttatatgtgtacagttgccggaccctgtatcgtaatattgcttttcaaatactatattttttttccggcagaggttcattcaagaaaagaattgaacccgaatagaaagacaaattatatttctttgagaaatcttgtcggacgagttctgtaacaagctcaaaatattttatgacgaaactattacgtaaatgatgccaattttcggtagttgcataagcagatctatgcttatgtattagttctgttaatgtggatttgattttattagaaaagcatccgttcgaaacttttaaggataaaatacaaccacctccctgaagtatgattaaattacaaaaaaacccctcatgtttggataattacaactatccccaactatgtatcttcttacacgttcacccttatggtgtcaaaattcaacataatcttctagattctatggaatttttcgtagtttttactcattttgtgcaaaaatgcagtttctgatgcaccacattcttatatatgtacaagccaaaaaacacatcttatgatcatcttgcttcaaaatgtggagctcgaatgtgataaaacgggtacaaaattgagaaaattccatataatctagaagattccactatatttgacaccgcaaaagtggacgtgtaagaagatttatagttgatggctggttgtaattacccaaacaagaggggttttttcgtaatttaacaataccttagggatggttgtaatttacccaaactttaatacaaatttggcttcacttttttttttcgcccctcttttataggacctctgaaaa

SEQ ID NO: 14026 - DNA, 2284 bp, Mimulus guttatus
  Intron number 2 from transcript mgv1a005170m (locus mgv1a0 05170m.g) derived from phytozome v7.0 (chr-ID scaffold_3; pos 1973474 to 1975757 reverse strand)
agtaccctgtcaccactgagttacaggtcatctctctctctctctctctctctctctctctctctctctctctctctatctctctctctctctctctcactgtctctctctctcactgtctctctctatatatctctctatatgtgtatctctctatatctctctacatatatatgttagttataatatcaaatttcttgaatattaattatctatgatattacaattattttgtcatggtttttaattttataagtttgcattttttttttgaaataattaagatggggaaaaagaataagtttagaatttacccttatatttaggtgatcgtcaatcgggactctaaaatagattatacgtgtattatttttatgatctatttagagaattgttagtatttaagggtctgtttggcgaaacttatttttaaacggttaatgtactttaacatctgataagttgttttaagatctgatagactgttatgtgttattttttgagttaaatttcaatttttcttgataatgaaattgtaagttaatataagatgttaaataaaagatggggtgaaagtattttttttttaaaagatcttaaaagctctcaatcaacttattttttaaagttttaaaatattttttaaaaaattaccaaatattttttaagatctttaatatcttataagcttttcttaagcgtttataagattgaccaaacacactctaatatcatcaagagtctctaactttttttcttcatgtttgctttttttatatatagatttaattaatataaaaatgagtcttgtatattaagttaggaaaatctcttgaaaaataaataaagttggtggagattaaaatatgaagcaccaccaaatgatgcccaaaatcgaaaagaaaattcaaccaattattgtgtcgattcggaagaaaaatactaaatataactaattataggatattttagttgtttaaattgagccaataatataaataaatacatatatattaatttctcctcatatagttaatcaagaaaataaaataaaataatttaattgattacaattcgtagaatatatgtatactatttatgtataattttttaaaaatgtttattgaatatatacctagttattattaatgaatataaatattgaaatattggacgattaatattatttctcatttgtatgattattatattattatctgacaagcgcatgttctgattggtttaattgatggggacgtggcggggttgtactttatcaataattgtatgctacaaagtattgtaccaagggtacccccaagggcatcaataattgtcctcacttaattcttgatattattattcttttcttattggttcatattttcattgttttttaattattttgacttgtaattattttgtcgtgtctgccgactacccaaaatcttagagtaaattgcgatcacctccctggtgtagagtttaattgcaaaaaacacattcttttttagaaattatatctagtcatctgcagtttgtagatttcttaaattcaagggtgttatcgtaagaaatctacaaattacatgagtctgaacgtaattgtcaaaaataagggtttctttttcataaatagaccttgcgtcaggggtcgggggcaattgtaatttaccctaaatctttattatgcagaactcaaaagatgaaaattggatcacatggaaaatactaaacaattaagaacccttcagtgaaagaaatttaaccttttttttccttgcaaatttcttttattatataaaaaagatcttttaaatatttatatttgattttgaaatttgtctcataaaaaaagttggagatggtggggccggggaggtatttatttttgtaggttttgtagaattttgtgttacctatttaaagaataataatatctatataaaatagtttcttttttaattagtggtcccacccctccatgattaaaagtcaaatatataatttttattttaatacgtagtgcaataatagtgtggccattgatagctagcctccaactttttcaaacaagtagtggtaatataattaatatttattctcaagataatgataattaaaggtataaagtaactaataatatatcataattagaacaagaaaaatgctaaagaaccctttagtgaaagcattctttattttatttttttaaattatctttttatattcttaattttaataactaaaaaaactatattttctttaaaaaaaaacagaatcg

SEQ ID NO: 14027 - DNA, 1162 bp, Mimulus guttatus
  Intron number 2 from transcript mgv1a020812m (locus mgv1a0 20812m.g) derived from phytozome v7.0 (chr-ID scaffold_131 ; pos 712016 to 713177 reverse strand)
tttagacaaaagcacagtgaagaagattcatttgcgtaagtgtgagatggatctgcatgattatgattatgattggtcatctggatttcaggtttataatccaaccaatcagtgattagtgaagacgttatgtttttcgtgaggaattttatcgattgccttttctttatgttttgtttagggtttttttttttcttttctcttttttcttttgaactgtgtactcgttctggataggtagatgaatttttgttatggttcctgcaattgtgtaagagttaatagtattttcttggaaattgattgagcttatgtatgagatgaattcatgatgaatgattttactatttccttgaatattttttgcatctcaaactttgtactatagagtatggaacctatccataatccaataatcctcgaaatctaaatccccaatcacacacttgccgagacattccaatcacacacttgccgagacattcatctttttctctattcaacttttagaggatttcaagaattacaaaagattgtgggtgggtggggtttttacgagaataatttaacgttggattctttggtatccaaattcattgattgtttcttgtaaaaatgcacttggctttctagacattttcaaatttaccacttccccctttacaaattaaaaaatcagacgcttctcctttaaaattttgttatagttccactttgccctaaaattcgaactccggtgtattttttaatggatttcaaaaatttccatccaattaaggggtataagcgtcattttaggccatatgttttttttttttcaatttcacccgattttaaatttatccatctaattctaatgaccaaattgcaatttcaaaatttccttaaaaaccctaatctccttcctttttctcaccacggcaccaccacctcttccactaccaccgctcttcattatcttaaaaaaccatcatcttcaggcataaagacccaccagctagtgcttgctcttaccattttcaagctccccacatcactagtttcgagttatcagtctaagtcacaatctaactagaactcacaatctaaatgttattctataataaaagaatcataattatactaagaacacctctcaaactcaaggtgggtgaaagaccaa

SEQ ID NO: 14028 - DNA, 679 bp, Mimulus guttatus
  Intron number 7 from transcript mgv1a004354m (locus mgv1a0 04354m.g) derived from phytozome v7.0 (chr-ID scaffold_128 ; pos 694153 to 694831)
atttacaaactcaggtacgattagtggtttttttttatcattcattgtctgttgtttcactagtaaaagggttaagttaaccagcaagaaaacaaaatgatttgaaagttagcatataccatagttatgcggatttacattgatttactcatttttacgattaagcataaacagatgaatatgcattaacaaacatcactattaggaaggcataataatgtgaaataccttattatgatttagtctttttgttaacctcaagatagaaaagggttttttgaatgcgtttctagttgagttggttgacattttttatcgtaaataattcttaactgcacttgaatataacaataactgaatacactcaggtaatttcgatccacataaccctgtacttaagccgtttggcatgtacactcatccgtttttctgttggtagttgtttgttaacttttataaaatacacatgtgacctttattttataaataagatgataaaaattctttaattcttattatattcattttatttcacttacacaccacagccaaaagatgatgaaactatttatctgaataatgtacaatttgatatttctacccaccgaagttttagctcttgagaatatatccatagctgacaaattgatatatcttctccagtacatcatcagctaca

SEQ ID NO: 14029 - DNA, 1192 bp, Mimulus guttatus
  Intron number 4 from transcript mgv1a024972m (locus mgv1a0 24972m.g) derived from phytozome v7.0 (chr-ID scaffold_68; pos 235955 to 237146 reverse strand)
gcctgctattcctatagtcttccaagtaagctctttgatccgttaatttgcagaaaccgacctcgaattattctatgatatacttaaaatgcaaataacctctcttcgggacaagcatacagaaactgctcgtttttttcgtaagaaaagaaatcgagtgttcaagattcaaattatgcaaaaaaaaaaaaaacctattatttcacggcatgcattgttcatatattatttcaattagttacgggtttttagcaggtttccatcgtaattagcactattggaaaacaaaatcgattttttgcggaagtaaaaaatcaattccaattccaatccaacaaaatttggaaaaatcgaaacaaaaaaacttgttttgaaattggaaaaatttcggattggaatcgggcggaattcagaatttccgttttcttagcctcctagaataataagggcaagttgcatgtcaccccctataaatttttaattttcgtactttaccccctcaaaattgaaaaaagttaatgccccccttccaaatgttttacttgttgctcattgccccgatagcaaaattccgatggattattaaccggaattgagtagttcttttgcacgtgccccttaaaaacattatttttctacacattgccgctttaaaatgttatttttgttgcacgatgcccaccgaaaatgagttttggggcaaagtgcaaccaaaacagtatttcgaggggggttatctcttttctgaattttcaggggggaaagtgcaaaaatgggaaatttatagggggtgaagtgaattttgtcctaataatagtaatataagtgtactttctgaaagaacaaaaaaaagggaattatttttagaaattaaaatcggatcaaaaatcagaatctaatatgtattccaatttcgttccgaaaaaaaaaatcggaatttaagaaatccgaaatgaaaaatattgttccgaaatcgctattctgattggaatcgacagaattcgaaaactcctctccaacgagacactacatacttgactattctataatctataattgtggttatattacaaattgcaatttcaaggcatgctaatttcacgatcgattaattactttttttctaattttaattatttttccgttcgactgtaaaggtttacaggttacaccaactgaacagggcagcaca

SEQ ID NO: 14030 - DNA, 854 bp, Mimulus guttatus
  Intron number 2 from transcript mgv1a013132m (locus mgv1a0 13132m.g) derived from phytozome v7.0 (chr-ID scaffold_3; pos 373017 to 373870)
gcaaggtgatgttttcttgcttaaggtttttttattctatttttattaattacctattagtgcttttcatgtatatatacatgatccaagaaaattttaattgtaaggccaagtagttgaacaacaaatcaaaattaatgttcttttgccaaaaactactcttgtgtaatctctaattgctaataatacatgtatgttaaaaaaattagcaagaacacctctgtgaaaaatggtcaaagccaaaaaaaatcttgacagcattacgtcgtgtaatgcacgtgcggatttttagagtaggggtgtattttttacttgaaaagtctaaaattccctatgaaattatttttggttccttttttgttcttttttttaatatttcttttgtaagggtaatttggtcatctcataaaagtcaacaataaatttcaaaataaagacccatgtgttttagaaaacataacatgggggcttcttgctaatttttttttacacaagtggtttttcggcaattagaaacaatacagggaggtttgtgctattaactcaagattaactgaacagagtaaataatctacagaaatgaagtaaaacaggttgagatgtataaataaatattggaattatatatgtttcaacattataataatttattttattcttttattttgaaattttattattggaattagaatctttaagacgttgatttttagtgaggaatatgttctttgtagtgcactgctagaagataattaattaccttagattatttaatatttatcattttcgaaaaataaataaaattgatcggaccaaattataaataatattggtgcatgcatgcagtttcccac

SEQ ID NO: 14031 - DNA, 1115 bp, Mimulus guttatus
  Intron number 2 from transcript mgv11b024654m (locus mgv11 b024654m.g) derived from phytozome v7.0 (chr-ID scaffold_6 ; pos 403316 to 404430 reverse strand)
gcaagaagttctcgaaaagcagcagcagaggcaaggtgaattagaggatactatcaattctcatgtctcgaatcagttttgaaagaatttatggtcccgaattcgtttaatacagaggtgttatcttaagtgttatgacacttgaacaaacatgcagcggaaatataaagataaaagaacaatactcataattaaaaatgttcacaagtaaagacttgtgaacttgccctttacaggacggaaaaatatattaaaatcagtattccaagaatacaaacggaagaggtgcgaaaacttcttccttacaaatgaatcattctcatgatcattcttacaatcaaatctagatactaaaagaaaaatattaaaaattctagatttcaaataatgtactcgtaaggagtacgtacagaactacaacaagtctagaaacatatatactaaacaatctagactacaaagaatgtacttatgagaagtacgtaaagaatgtactcatgaggagtacgtaaagattatactcatgaagagtacaaacgaccgattctaaaaccactctaaaatactcatgtattcttttcagctctcggttttttatttcgtagaatcgatttcatttcttgagtcttgagtttggtatttatagactttccaagcttccactactcagcccatgatctgcaagaaatcccctctatagttaacggcgttaacttttaacgaaaaaaaaggatttcgtgcaaagtaaaatgaaacaaaaggaggttctacgcaaaaaagaaaaaaaaaaaaatccacatgggatttgacgcaagttttccttaacacatgaagttttatgttgtttaccctagaaacaattaaatatggacttgcgtagttaaggaatcttttgaattataacggcttaatcccattttgcatccttgaaatggaaccttttgtcatttttcattctcaaaagacaataaatcattcacaatgcaccattaattgaataataaaggagaattcattttttattggtttttttttttttcggcgtgcagaataacaaattatttttttatttctcttcagcttccaacctaatttcgagcgcacaaagtgcgaaa

SEQ ID NO: 14032 - DNA, 705 bp, Mimulus guttatus
  Intron number 5 from transcript mgv1a006444m (locus mgv1a0 06444m.g) derived from phytozome v7.0 (chr-ID scaffold_667 ; pos 8583 to 9287)
aatttgacaacagttacaactagacaactcatagcgtatgctctctaatattaaaaaataaaatcatcgttacgtcttgctttctttttgtcaacgagtttattgattgtgatctattataagcatgcttatctgtatgagggggcttctgaaagtgtgcaatcatgcttggtttatctagtacacaattatcaggaagtagttgcagtatccgcatgaataatttctggaattacaggtctaaggtgaatatggattgacgctgtaatttacagctctcgattgttaaggagttatcttagcctatcgaaacacggatgaaatattttatattgtgatattggtcaataagagttgggaacgcatgtttaagattttagctaggttatgtcaaatccattttcatcacaataattataactgtgtattttagtatgatgttttcttgggttttgtagttcttaggagagcatgacatctttcttagaaatgtgcagaatcagcccccgtattaagtttgatttcctagttagaataaatcagaatgataatataacatgctataaagccgagccatattttataaagggcatattaaatttgacattgttttgatgcggctattgtttagttatatatttgatgcatcaatttgttatttttgactttttgaaaatctaaagttgtcaaatccctacaggaagt

SEQ ID NO: 14033 - DNA, 1818 bp, Mimulus guttatus
  Intron number 1 from transcript mgv1a013729m (locus mgv1a0 13729m.g) derived from phytozome v7.0 (chr-ID scaffold_206 ; pos 132662 to 134479)
taatagagagagacagcccatattgagagaggaatgtaagaaaagatcgatcggaagaattgaatcgaatgtatagaattggattgagcaaaagggggtttcggtgtggaatctgattggctggaaggtggggaaaagttgaagctgattatgcgcacaaacaaaactggggaatacaatacacccacgaaaattaggtctgtatttttaatgattgtattattttttgtacattaaaggccaatcatacggcatcgccgggtcctgtatttatacatatatattaattattattatatttagagagagagagagagagagacagagtatcgaatatttcagattttttaacaatatgttccattcacaaagtccgatttccaaatttttcgatttttttttaacaattttggaatatatattagattttttattttcattttgattttaattttggaagatatttcaagttctgtttttttcttataaattataggtgactaaaaaatggaaattttgaaattcaccgaatttcaatccgaaactatccggctttggaactatttgagatattaatattaaatgataaatttaactaacggcttaagattttttgttgagatggttggttattcatgacgatccaattgtggatatgaaggagttattcatatcgaagttgtcaatggtattaacgccatgccaaatgaaaaaggttctgcattcgaatcccaccgacattcttttcaaatatttcaagtacaaggcttcagatgtaatttgactacacttgagggggcgtattggagatattaatattaaatgataaatttaactaatagcttaagcttttggttgagatggtcattcaacaagaacatatttttacattccggttttcaactcttccaaactctttcataatgaaattgaaattagttttccgctttcgaaaaaaacttattttttgtaagtgtcgatttgcggattcatgtgaatcggaccgaatccaaatccacatcgtctgagaatgcttcatgcttgtttgggtaatatggccgagttaaaagcatgaagaactcaaaaacctaagccaccaactgatttaggcatttaggcacacgcaccatagactaatttatcgttaatattgtcttttaaaaaaatcgacataaaaaaaaaccaaaaaaatcaaaaataaaacaaagaaaactcccgccacaacattttatcaacagtcacaagtcacaacacactggactatatcaacagctgcaaaatgattgatttttcatagtctgctaatagctcaacaatttactttcatgtttataagaattatttcgtaccgttttgcttcaaatggaactcatcgtaagatgaaaatcctcgattgtctgtcctcaaaagatataaaagtgtaactaatagctaccaatattaagaaataattcagaatgagtaaatgctaaaaaatttaatgattattgaaaaataaccacaacgccttactttaaataaaaaacaaagattgcgtactaaattaacatattttttcgatgattacaagaatttaaactacaagtattttctaagaaaggagcgtcgaaaaatttactcgttttcaaattaggctgaaattcgtgtaatcccacttactgcctttattgcgccagaaagcaagacgtaaagtacaaaaaagagagtaactgactaaaaacgtgccgaaaacccggaaaaagaaaaaaaaaacaaagaccttcgagaaatcggtaaaaagaaggcggagaactcaattgtgtgttccctcatatctct

SEQ ID NO: 14034 - DNA, 1339 bp, Mimulus guttatus
  Intron number 1 from transcript mgv1a008051m (locus mgv1a0 08051m.g) derived from phytozome v7.0 (chr-ID scaffold_89; pos 707345 to 708683)
catcttcattgcgttgcttttcctctccgagttcagtacgtgattctttctattttatgcttctgctgctatttatgtagttgtttattgttttgctaccgtttcttcgtttctgcctaggttttagggattttttttctctatgtgtgtgcgtagaaaacgttaattttggattttctttttagttttgtttccctgaaggaagaactaacggcttattgcttcatattttcctgggctaatggctcggaatctatgagcaatagtgatagttgtgaaataaggagaataatggtgcatatggtggtgtaaaggagagaaggaaggcccgattgggacattgagaatcaataaagattcaaaatttgtgcgtagatctggacactaccttgttgtatttatttcgtaatatggaacatttagattagttcgttgaattgatgtcagaattagtcttttaatgtagtttgtttccttttgtgtatgatgttggaaatctgttgtttgctcttagaattaacactgacaatcagagttttcacatatgatatactgtcagaaagatactgaatggtgtgttttcaagttcttttgtggatcctactttgcagtggtaaatgtgaactgatattaagtaaggtccgggttcgacgtttctggttggagatcttgtgtagtagtaagatagatgctagtctattcaggtagagtataggtcagcggctaagaaatgagttgcatacattagtaccgaggaattagttaagaagtagatgaaatataagtcaaatggagtcacctatttgctttgtacattatactgattttggtcgagcaacaggaaatgtgaatggacgatagaaaaaagttattggttatccgttctaatttggtatccagttgaacgtgattattgaattgatgaaatgatatttatgtaaaaggccaaagaaacagaaagattgggattgggattgggatcttgtatcctctttgcattttgcagtagttactatctcgcctatcaccgaatgggattgggatcttgtatgaaagcagttgttttcccaaaatttataccattcaagcgttatttacgtgtatgtaatcttgcaacatgttttgtgtaataaaagattatgccggcatgctgcaactatttcttagatggtggtgatatctttcttatataattatttgagagaaattatctaatatacatcactgtgcagtatgttgaagctctttttctaaaagttgcatttttctttgtatattaaatcatatttgttggcaacctgcaggattatacctccacactgttacagattcaaagctt

SEQ ID NO: 14035 - DNA, 1551 bp, Mimulus guttatus
  Intron number 2 from transcript mgv1a016874m (locus mgv1a0 16874m.g) derived from phytozome v7.0 (chr-ID scaffold_92; pos 131034 to 132584)
ataaggaggtatttttctgtttttgcccaaaaatctgtttttttttttttctttttttttaatttgtttattattggaactgtgttgtagaatgtattcttatctataaggtgtagtggtgtgaaaacctaggtttgaatgtgtagaatttagagaattctattaattccgctacgcctcgaaactctgtttctgcaatcatcaaggaaattggtaatgaaaaataaattttctgaattttgtagatttttaatcatttatatgatgacaaagaaattggtaatgaaatgctactcgatgaaaatctattttgttctcttctctgagattacattgattaactaagggcataccaaattattgcataattacttgtgtaaatgtggacgaaggatggataagaaaattaggagtttgatcactgcaacacgtttaatgattcaattgtatctcagagtttgatcactgcaacactttgatctgtaactttccgataaatgttcaatttcagtacatcgcattttcctctatttggttagctctatctatatttgcttctggtctttgaacataatcaagtcgactgtattatgtttcatttggtatactacatgtcttgtgatcaagaaaaagcacaataaaactcataattacgctttttctcgattttttcaatgacaaagggaatgggtacgttatactacttgtaccgggaaggaggagttcctgcacattcacacacgagattaattttcaaattaacatgagcttaaataagttgttttagtaagaattaggggtcgggctagtgagttgttgacgtattctcacctgacatctgaattctcatttttttgttcacccttaggtttctaaagagaagaacgatatgacgattatgctcataaattgtgaaaacaggctcatcgtctcaaatttctttcttttgttcattcattacatagagagtgttattatgtaaactgtaataagcacaaaacataaaatttgagcattatctctccttcaattcaaacctctaccttacagccgactgctgtacataaaatcatcgtctaattgaccacacagagccaatttcatgaatatcattcttctttcgttcatttatcttcagtttcgcattatgtgtcagcgtacaattgtatgatttctttgttttgcctgaggttatattgatcgctcttgagttatcccggaaaaaaatacagtatatatgtacattgacttcaaacaaccttgtcattgtcaaatgtcaaacagtttgatcagccgatttaattcatatttgcatctttgcatgttcaaaaaataagactgttgtaaggtgcttaagctgtataaaacgatgtcgatagttacaatcgttatccgcaaaatatgttgtgaataggatgctgcaaaattcgaagaggataatcgattacctcaataacacactaaacattaagttgccgactttcgtcattatctgaaatggtttttcggtttcttatcagtgtataaaattcaagacagaccaagcacagg

SEQ ID NO: 14036 - DNA, 509 bp, Mimulus guttatus
  Intron number 6 from transcript mgv1a007467m (locus mgv1a0 07467m.g) derived from phytozome v7.0 (chr-ID scaffold_12; pos 2079176 to 2079684 reverse strand)
gcattcttcttttcggcccccctggaacgggaaaggtttgtgttccacttcatttgttttctgctctcacttctcagtgcaagtaattgtgtattgaacagtaaaatgtacttgattctccgtatgtaattatctgttatcacttggtagacatggtttttgaagatttgatttaggtcataaggtgcattgatccaagctcatcgaatatgtattatttgtctaagtttgtttctcgcatgattgcatagaaattgaattcaagattgcaaactgaatacaggatactggtgtcacttgtaataagtattaacgatatcaagttagagcccaactctaagctttgtagtaaaatatttattttctgccactttcttagatcctttttcttttaatcccctgttttctgtcatattgtccagtactaatttgccctattttgaaaataaataatggttgttactataaacacatcatatgttctacacctcccttcaaatttgcagact

SEQ ID NO: 14037 - DNA, 768 bp, Mimulus guttatus
  Intron number 36 from transcript mgv1a000068m (locus mgv1a 000068m.g) derived from phytozome v7.0 (chr-ID scaffold_10 7; pos 225973 to 226740 reverse strand)
caggtaggtacaaataaaacttttgccaaatctcattaatggtccctcatcttcacatttagtctcactttagtccctcatgtcttaactgtctcattttcatccttcatctctagaatccatctcattatcatcccttggtgtataaacctgttaactttaacagaatctttttacaaaatggatggaatattccgttagaatattttttgacaaattatgacttttttcaataaacaataaagtttgtaatttaaaattaatatttgcaaccaacaaaaatataacttataaatatataacttaaaaaactactatttttacaaaatattaatttatattaatataaaacgaatcattgattttgtggatatatgacttgaatttagaaacgtatttaaaaaattataatatgtcatctacatatattctatatcaaaaaattatttatattttttatgatcttgtgttaatatttaaaaaactaattcaattatattaaaagattccattaaagttaactaaattatacacctaatgactatattgagatatattgtagagttggaggatgataatgagacaattgggacatgagggactaaagtgggactaaacactaaaatgagggactattagtgagatttggcctaaaaatttctatgttaatatttcccaaaaaatatcctttttaaatttgaagtcttaatgaaaacttatacattatatataggattcaataccacactgcggaggggatttgttacg

SEQ ID NO: 14038 - DNA, 428 bp, Mimulus guttatus
  Intron number 2 from transcript mgv1a013618m (locus mgv1a0 13618m.g) derived from phytozome v7.0 (chr-ID scaffold_64; pos 258362 to 258789 reverse strand)
ggcaaaatcgtaatagcgctcgagtggtgagccacttgattaactatttcttgattgcttttcaggatgaagacctatgaacaatatacggtgattctagctagattagattatcgagaattttgttccgtgttatatctttaagcttcttgactttcaatgcccatacttgagaaaatctgatttatgttttctatgtttgtagttcatataactggcttgatttcttgctgcttggtttgtatattaagcattaaacataaacggatgaattggatcaaatgtcggagatttttgtgattatcaaatgttcttgcttacatctacttaggttcaatttcgtcgacttaaaaattattttgtgctgatttttgtctatatatttcctgtcagtgcaacttggaaggaactaaattgcacgaacatca

SEQ ID NO: 14039 - DNA, 2192 bp, Mimulus guttatus
  Intron number 2 from transcript mgv1a019650m (locus mgv1a0 19650m.g) derived from phytozome v7.0 (chr-ID scaffold_217 ; pos 160972 to 163163)
atacgacagatccaggttccaggtaaactcgcaacccttgaagcttagaaatagatgttactatcatcaacttgtgcttggattatggttctgtttttatcatgtttgttatctgtaaccttagaattgtgataacttgtaattagcactgaataaatagctctgatatgattaggcaaatcgggttggtgcctgagaattatcacgaaagtttattggcattgcaatgttttcacccaattgaagaactgactaagtcaccgtcgaaaggactgtatcaatataatatatgaaagcacttgtcaaaatatcataccttaaccaactcctctcaaaattattgatcttgattggttcttagaggacttataatagctatttgaagaagttgattgctgaattatgtaacaattctagccggctcatttctgtttctagcagaatggaactctatcaaatatcaaccgaggagtttatgtattgaaaattagtatgcagcgtaacggggtttagaagctactacatacttctctttcaacatcaaaatgaaaaagcctgcaatttccagtgtattatcatataggctgtttcccgagactctgctgaatctgaagggacctactgtctagtttagattcaatcagagcacatatttgttaccttgtgtgcttgtcttgatttttgaatgtaaatcttcttaataatgttcagggtgtgtatgtgatttaaccaatacataattcacgaaccggtacaaaatttattttcttgtaggaggcacatcacttgtgacgttctgaattgcccatggcatgtaaaacgaacataaatatacctgaaaaatgcaaattctctccagtaattatgttgaaacattcatatatttatattagcccgagtaggaataaatgccagtgtagtgtatgaatctcatgatatagatatatatgtacaattttcttggtattataaaaatctcgagtcagtaaaattctaatgtataaaaatatggtccagtaagcatgatataaaataaattaataatatatatatatgtgtgtgtgtgtgtgtgtgtgtgtgtgtgtgtgtgtgtgtgtgtgtgtgtgtgtggagtatacatatatgtttcacatgccataaatgttggttatcgccacccgattatataaattattatgaatttctactcatctttatcataggttattctcagatggaagcatcttttacagaattctgatatatttttaagtttgttgaatcaatctagttagttgaagttgctaacgatttctggaacctatagatgctacaagattagggaatttgctatctgccaaattagttcttgcttgtttaatatgattggtggactagcgaaacacagtgttttattaagttagcgtataccaaataagaaacacctttaagaattgctactaaaaggcattgctataccttattttcatgaagtagaagagaaaatgaaaaattgtcattaaaaatttaaacaagcttgaacattcatgtgttcggctcgactcggttcgtttatcctaagtgctggttaacttattaccctgctatttgatcatacattattacctagaagaacatacattagaactttatttttactttgaatatatattagattatttgcaaatttagcgattataggtttaactacaaaaaaatttcatatgcacagctgataggagtcagtatggtatgttgaaatccttacttcaaacagctcgcaaattctttcttattgaacatcttgtccaatcgttttactgataatattctaatatggttatagtttaattcctcgacttctatctaagatagccaatctgatacatgtcaatctgtcagcttgagtttaattgtggtgcgattctgtatgtgggattattagtcagtttaaattgctttatggatttctatatgtaaaggggaaggaaaaaaacatgtatagattttaattgtgatttaatgacacgcatttggtatgaattactgatgtataaataaccatgtgtatacgaatataaatctcttttggtttgaattatttggctgttaataagtatttcaagctcggtatgtttagaaaggtacgaactaacatggtctctgataacgatgcatgcatgttttggcagacaaggttcatttgatctagc

SEQ ID NO: 14040 - DNA, 1576 bp, Mimulus guttatus
  Intron number 1 from transcript mgv1a016315m (locus mgv1a0 16315m.g) derived from phytozome v7.0 (chr-ID scaffold_49; pos 245384 to 246959)
accgacttgaagatcatcggcaataggtacaaaatgcccggctctgactgcaataacttattctctcgctttcttcgcttcttctcttatcgtcgctttccttctatgataggatgcaagaactccccgatctctaatacaatccggatcatccggattgttcgacttcccacccaaagctttcatcaaactcttacattttcccgcaacttgactcattaaactttcccttctgcctctggccatctgtaatttaacataaaaactgaattagtatttaattaaaaataaaaataaaaataaagttgtcgtgtgaaaacaaacgagtagatctatttttctcttgtgcaggcacgcgatgacaatagatctgctagcgtgttttcacacgagcaacaaaaaaaatttaaaataaatagagctcgtgtgattttaggcgagttcgatgaaatgagctcgcatggcttgacacgagcacaaccccctgttcgcctaataacacacgagctccattatttttaattttttttcaataaaaacatacgcattttcaattataaaaaaaaataaaaaaaaacatatcttcatcttctcgcgtggttctacacgagtaactccattgtactcgtgtagaatcacacgagtactactagatgcttcgtttaaaaaaaaatcaataatcataatctacgtaacgaaacaataaaaaaaatgtagaaattacctccgatctattgtcgtctcggtcggaatgtgaaatcgaactacaaaagcttgagacagtttgtgagaatatttaccttttaatttttgaagaatagtaaaagtttttttttttttttgaagaatagtaaaagtagtgtctacacgattaaccgatgcatgcactgatcatttcagttatataaaagaaaaagaataaaaagggtccacagcaaaattaatctgaaattcaaattcaaatacccgtaaaaataaaaataaaacattaaatttcaaatagatatttattaaaccggaaaataatcccacccaaaaggttcagatttgcctcaatttgtaaaacccttgttccctctcccacccacccccaccccaccccccaccccccaccaagtttcccgatccctccccctcagcggtagagaaacgcgccgccgcctcttggtaagtagaacaatcatcaccactgcaagaagattctgtgattactattcgatatgctgctgatttcattaaaaaaataataaatataattattttgatgtacgatgagtttattgattttgcctgtatcgtagattgttcgactcgactttttttatctcagaaaattgttcttcgtcttgttagttaactctaaacgcaatttgtgtatagttaaatttaattctctttcagttttcatttttcggcactaatatatgcttgtggtattgaatatttcacttgttttcatttaaagttgtttgtgtgttttggtatgagtatgaaatatgaccgattgcgttttaacgatagttcgatttctattgaaacagaaattcgcagcagcagcccgacatcaaattgctta

SEQ ID NO: 14041 - DNA, 3216 bp, Mimulus guttatus
  Intron number 1 from transcript mgv11b018749m (locus mgv11 b018749m.g) derived from phytozome v7.0 (chr-ID scaffold_2 8; pos 1386889 to 1390104)
aatccaccagaatttgcagcagatttgctcccaaagtatttcaagcacaataatttctctagcttcatcagacaactcaatacatatgtaagcagcccctttgctttcttttcttttcacttcaaaaaaagaaaaaaagaacaaaaaaactagggtaaattccactttccccctagtactctcgattgcatccatttgccccctgcacttgaaaaattgtttcaatatggccctcgccgttagttttcagatcttttaccttaacactgttattatttccattttgcagggttttagaaaggttgatcctgatcaatgggagtttgcaaatgaggagtttattcaaggacaaagacacctactaaagaatatacaccgacgaaaaccaatccacagccactccggtcaagtaaacgcattaccgttactaaccgactcggaaagacggggtttcgaaaaggagattgaaaaacttagacaagaaaagctctcccttcaatcaaaggtggataagcataaacacgagaatcaaggatacgaatatcgactcaaatcgttaggacacacattgcaaaacattgatcaaaggcagagacggttacttgccacgttggatcacgtgtttcaaaatactcaaaacaagaagagaaggccgacgttttctttcgaagaaaatcgaagcccttctccgtctcttccgttattgaacttggacgccgttgagaaattggggtcttccctaactttttgggaggaatttatttacggggtcgataaaattccgtcgtcgcaaggtttgcgcgatgcgtcttacactacttatgtcgaaagcccggccgtatcttccatttgcgttgatcgggactcgagcaatggacggtcgagacttgatgtggatatgagcgcgattactaaaactcgggatgttgaattagataaagatcaagatcgggatggaggcgtggcttgtaatgtggcggcggctgggggtaatgatgtcttctggcaacagtttcttacggaggctgaagtggaatcggagagacgagatcaaggagacgatcgtatgaaggatggtggtggatttgcagatgaacacaaaccttggtggaatgtagagaagcttcatcaatagatgagtcaactcagtcgagttaaaaggacctcattagtgtagctggttttcgagtcctagtttcaagggcttttatgtacaaagattgtttcatcacgttattttgcatatgttgttgcatagatagatgcacacacttttttattttcattttggttgatttacctctttttatgatttcttttttttttagattatatatagagtacattataactttgataaactaataatctcgcttaaataatagtttctttcggtcctgattcggtgaaaacgtgttaaattattaatttaataatttaatatttcgctaaattaatagaatttctcttgttccggctgtattaatttatagatgattaactctcggaatttttgtgcatatttatttgtatctcacttcgattagattttattttgggactcgcgggtacgggccggtattgtttttcgtaccggtttcgggaactatacaaaaattgtacccgctaaaaagtccacgagaattaaaagtataaagttgttgttcttttttttttctttttttttttagtatttgaataccactacaatagtaaaaatcaaactgcaagtaacaccaacaatctctaacaaatgtattttataggtgtgataaaataattgtctaaattttgcaaatgaaataaaattaacaatgacaaataattatataagtataaatgaagaattacatgtttgtcatatatgtagaaggactagccattaagagtgcgtttggatggatggatttggagggaggatttgatttggggaagagatttgaaatgattcaaatttgaagtcatttgaaatgattcaaatttggtgaggatttgaaatctatctccaaatccctcaatcccatcaagtccaaagaatttattattatgtatttgaaatttctcacccaaatccctccatccaaatgcagcctaatagaatattcagaaactcaaacaactttaccaaattcggagagtatgggtggatgacacccgaccagtaacatgtttcgtatttggattggtacgataccactttacgtagttgttgtcctaaataaatttggccatctccaacagttcgattgtctatatttataatttaagagatgaatagtgttatgcaataccacttttaacattagactccaacaacattgtttataatttacacaattatcatattttattattttacaaaaactttagttctgaattaattttaacaactataattttaatttcacatacatacatatattttgttttagttttttactcagaaactttttggaattaaaatatattgcaaagtataatttaatgttatatatacatatattaaaaaaaaaagctaaacactctttattttattaataaaaagaaacatatatgtgcaaaataattactatctgcaaaataattattgtatttaatatataaaaaatggcactaatggaacttttattattatttatttttacacaatttggaaaattgtaattttggtttgtcaattttggatatgcaaagtaaaaatgtaacaaattttgccttttcccacttggttattggagatgtgatttttggtttaaaatgtgtaaaagatataaattatagatatactgttttttgataagaagtaaattatagatatacatcatcctgttggagatgctcttacatcaaatactgcataactatctttctacctatatatattgattttgtgctaattgcacataacccctgtataatctcgagtggttcaaaagatccttgtgttaaaaatattagcaagcaaccttatgttattttttaaaaagcatactgccctttattttaaaattagctgttgacccatgtgaaattactaaactacccctaattaaaaacaaatagtaaagtaaaatatccaaatcacaaaaacgtatccaccgtcggtccattttctggattggattcttgtttccggtcatcttctccggcaggaatcttatttttcttctctatgttgaagaaagcccaaaatctcaaaccctgaagtagggcttt

SEQ ID NO: 14042 - DNA, 812 bp, Mimulus guttatus
  Intron number 1 from transcript mgv1a003021m (locus mgv1a0 03015m.g) derived from phytozome v7.0 (chr-ID scaffold_3; pos 1995725 to 1996536)
tgatttatctgcttcaacagtagtataaatttaaggtacaaaaattaatcatttcatcaccgccattaacgcacacctcacaaacctcacttatcttctgtgtactggtaagcagcttccatttttttttttttttccgattattactcgtctccaaatcttgattctttttctttcttctttttttttttttttttttttttttggttcgatcacattttatttcggtatgtattaatgctaatgattaatgattttgctggtttttttgagattttttttttggtggagtttcaccttctttgatgcaattcgaactcgaaatagagtgtgttatgatttatgaacttatgatcatggttcccggcaaaagtggcggtacactgtcgtgtcgtcgcggacactgctgttccagttccattgcagtgtcgcggctggaactgacaaatgttaattaaaatgtaaaaaaattagaattaatgtcgaataagtttttaatgttaatattacagtagaataataatatacaaactaccattaaaactccattttttaattttagaacaaaattcttcaaaaccttgagaagtgtataaataattggaatttgtttattatgatctgattatttcataacttatgatcagttaataattggaatctgttttcagaattcgaaaatcgaaaatactattggatgtttaaggtgtcgaaacttttggtattttgaatgcttgagcttaaccgaaaaaaagggtgtgtttgtgtaattctgattatgtatatctgttgttgtttatagttatacagat

SEQ ID NO: 14043 - DNA, 405 bp, Mimulus guttatus
  Intron number 1 from transcript mgv1a014268m (locus mgv1a0 11845m.g) derived from phytozome v7.0 (chr-ID scaffold_7; pos 2535054 to 2535458)
agctcaaggctttgtttcccgatactgaaattcaggtgagcgttacgcttaggtttcattatctctgttgttcctagggtttggtagatagatacgaattgttcgttatatatttgtttcttgagcaatacgatatcttgagcagtctcttaaatccaatccaaccttgtttgttcattttaaatgaatttatgtataattaaattcggctgaattgtattgtttgggaaaatggtgaattggaatataatttagcagctgcttacaaatgcttaaaaatatgactggttattcggccttttatagtgcacgtaccatcgttcactcttgttattctgttcaatcttaccgtttctttaactactttcagtttctcgagaaggctctagaagattctggcaacga

SEQ ID NO: 14044 - DNA, 980 bp, Mimulus guttatus
  Intron number 16 from transcript mgv1a000347m (locus mgv1a 000347m.g) derived from phytozome v7.0 (chr-ID scaffold_47 ; pos 472178 to 473157 reverse strand)
gagtacgaattattggatagtaagtcgttttaatctttttgtagattttttatgatacttcttaccaaggtagtcaaaatcaggattttaagttgaatcggagagggtagcaaaatcggatcgaaaaatggtaagggtttacatatattgtaaaattaatagcaagccattttatttgtattttttagtacttagaaaacatctccgaaaagaaataaaacaagtaataacacgcataaaatatgtcctaacaaacataaaacattaagaaaacatgtttttagcaaattagggcttatctgggtaattgggctttctaaattttcgttagaaagtcagagattcaagcccaaacttgaaattaccgattttactaccgatttcaactgggtttaaggaatttgcgatttagcactccgattttactattagtaagggtgtaaagccgtagaatcttactattgtacgatttaaatcccgagtttaactaccttggttcttatatcaacatatacgatgaaatgtgataaattgctagtacatctatatgtaggggtgtaataagccaaaccggcacgacaaaaactcgagttcgagcttgagcctgctacagttattcacaactcacgagcttttttttttattttaatttattttatatatatatatatatatatatatatatatatatatatatatatatatatatatatatatatacataacaagtcgatagcttgttgtctataatttttttattataacaaggttgatatataacgtcatatataatggtcaaacgttctttttattcccttttgatttctaatgaaatactcgactcaaaaggatatgtttttcattttctttaggtgatggtgatgattgaataaatggaaatttgatttcatatacaactaacttcttttcgacctcaacttgcagatatattacagacaattcatagctccgaagacaca

SEQ ID NO: 14045 - DNA, 1003 bp, Mimulus guttatus
  Intron number 3 from transcript mgv1a005397m (locus mgv1a0 05397m.g) derived from phytozome v7.0 (chr-ID scaffold_26; pos 1121881 to 1122883 reverse strand)
gaagtgttatttttgggtatgttttaatcttttgtcttatcatctttgtggtggcaagtactactggtagtcattttttatgtgctagcagtaactttttgtgatttatcattttgaaataggaatttatgtgtcattcttatccattgcttgggaagtatatattaaatgtttgtaggagttactatctgaatgttagtgaattagagcattttctatgccttgtggagcctctgacatgtagcaaattagcaagcctcaagatcttagtgaatttagtagaagttcatcctaaaaatatcgagactagcgttatgccacataatggataggtatatttataaccacaggaagatataaaaagtctgttatgctataaaatttctgcttgagcactttaaactttagataacacactgctacagttctacataccaataatcattctatgaaattatgtggtctcaagatgcaaacatgctaattgctgaatttggtaggctcgctcaggtctcattttaattcaggttagatgtaaatactggttaaggtatggaatatcaattgaatttttatattctttcggatagaaaggtgagttaataagttacatgtgtatgcctaggttcatattataattcttgccaaatattctcgtattgttttcatattcagagggaaaaaaggtagaatgcacctgattcgtcatgtctctcctcatcatgccattttctctgatatatttgagtgtattgtactcccatttattctgggcactcgcattttattctgtgtatattgataggaattcatggctttatcatcagtttgtctcaaactgaatgacgcttctgaaagtatttcatctcctctctgtgcatggaaatattactaatatagaaatataattcttatctttgttgtcttattaatggtttcttgaatctaatatgtatatatgttttttgctttataatttattaaatgcaatctttttgagcag

SEQ ID NO: 14046 - DNA, 2404 bp, Mimulus guttatus
  Intron number 1 from transcript mgv1a014464m (locus mgv1a0 14464m.g) derived from phytozome v7.0 (chr-ID scaffold_243 ; pos 215454 to 217857 reverse strand)
aggggaaaactttaccagtattgtagcgccgataggtaattaacaccacctaatctttttcttttttttttccttcttaaattctgtttttgtttacatacatatagttgaaattgttggttggtgggaatttcaaaaccctagttctcatattcctaaaatagatttttttgagatatttcagtaaccagtttacgatcttttagagcaactccaataaagaggaattaataaggggatcgaataataaaattactatttatgtacttgaaaattcaaaagtactcctagggtgaaggaatttgaggtacaaaattgcacccagacccaaaggagaggattcaaatattccttagaagctcctgcaattttaacatgaatttttttaataaaaataaagaaatctcaacatattacaaatataaagagataataatttatttgataactatgaggaaggagcacatataatttttttgaaaaaatgtcaaagtattacatttagcatcaattaagtgtttgatacttcaatttgatatctctctcgccactgaagttgctcttaggttctcaattttttttcctataataataataataatacataatgatgtattttttttttcaaaaaacgcgtgtttttaaaggcacacaacattagggatgaaaaatcgagaaattgaaaacagaaaaaaccgaaccaatatgcaccgtcttgacttaaaaccgcatatacagtaatttttttttgaaaaaccgaaaatatcagtttgtgtattgaaaataaaaaaatcaccgaaccgaaccgatttatacaaaatgacgtcgttttgatatatagtaagtataaatatttattgtcttcccgtatcgtatcgcgcctctattcttcgaatgcctccttgtgacgtgttttttattagttaattttgcgttgttatttgttaattttctcaaccaatgtaatgaaagtccaaagtttgttaatcaaatatcgcttttatgccgaaccgatagacgaaaaacgaaaccgaaaataaaccgaattgataccgaaaccgtcaagtgagaaccgaacaatcaattaacaccgaatcgaaaaaaaccgacatgttcggttcttaaaacatgaaaaacctatattatcggtacgtgtttgatttattgcaaaaactgagccgtatcgacccgtgcacacccctacacaacattagtgtttgtcattcaatcattgaatataattcatactccatatctgtttcacaatatccttccggaaaaaaattgtttcgtattagtatttgttaatagttatgttctttgagagccatcttatatattgtcacgagttatcctcgtgcatatgacaagctttgttgaatcacatataactttccatctttgtataacgtttcataaattattttataataatattattatttgtaagaaattattgttattcaacaaatataatttatttattattcagataataagaatactattttattctttttaccatgtaaagtataatttcaaaataaataaataaaggagcatttgaaattattatgataattcttagaagataaatcttttagcgcactttgtggattttatcaagttttgctcctccgactgaactttcttttaattctgatgattacatttaaaattttgactctaataatcaaaattaggtaactatcgatttctcgttacaaaactaagtttgaaaaaagaatgagaaaaaaaaccccaaataaggaattaaatggtctcggacgggtaatttcaagaccctttacgcaatcttcatgtactcgatcttgcaagttaacattggctataagttcttactcgtaaatggcaagtcctcttttgatcgtgacttatcatgcccttatatttgaaccttgatgtcgatttttcttgttctcttacgcctattctaacattatttcatatgtaaaaaaaagtatgacaaacctcactttttgattaagacacgagttcaaataatattcgagcttaagttcatgttgcttactggttgattggtcacattttcagagttccatatacacgagcaagatataattttattttattttttaatcgaaaaaagaacagatatattctacgtactagagatgtaagatcaaaaacatattgtacgtttgtaaggactgaatgtactacaaactctagacaatttatgatggtgtccttttctactttccaatattccatgtttgattaaagtacatatgattttgtttcgtagtgaaagatcattgcatttcttatggccttagctttattccaattgcattcttattcttcttttggttgtagctcaatattattttgtttttgtatgttgttgttattaaacagc

SEQ ID NO: 14047 - DNA, 767 bp, Mimulus guttatus
  Intron number 4 from transcript mgv1a027048m (locus mgv1a0 27048m.g) derived from phytozome v7.0 (chr-ID scaffold_17; pos 167524 to 168290 reverse strand)
gttcaataatcttgttgggaagatacctcagcctagtaccgggcagttccctacatttgaaaacaattcatatatgggaaactcgggattatgcggatttccattgacaaaaaaatgcaaacaggacaatgtacaaactttgtttccggtgttgccacaaggtgataatgattccgattttatggatggttttacttggcaagctgttgttttggggtatggatgtgggttcgtatttggaactacgatcagttattttattttccggtatcaaagaccaaaatggtttgttggcctgtttttcaatgctcaagacaagatacatgctaacaagaaaaggaatgttgcacgacggagaacttgattggagatgcaagttttgagcttgtcttttcattgtggtggaactataatattgaacttcataaaatacattaaaatttagaaccatatattgtattctatttgaattgaaattactcttagtatttgatattattatataagcactttaacatagatttctttctattcttgcaataccttaactaccaaaatgtaaagaaaaaagaaacaattgcaacaattatataatatcatcaatctccccaatcttgtttaactccatgatcaataatttgggttattctttgaattttcttataccagattaactttagtttcaatatattttaaaattgaagtatttctacaattttaagtttcatttagattttggcgtaaacaagacaaaaaatttggactta

SEQ ID NO: 14048 - DNA, 526 bp, Mimulus guttatus
  Intron number 3 from transcript mgv1a003066m (locus mgv1a0 03066m.g) derived from phytozome v7.0 (chr-ID scaffold_30; pos 1217387 to 1217912)
acgagctaacacacgagcttcaacttagtgtaacggtaggtaaaagtacttatttgaattttgaattttgtagaagcattgatgcttaaaccataacaattctgtttctttcttgctaattttgttgaagaacgacattgtgactgcagcagattattgattctgacttctccaaatgggcttttgtgtactaaacctctgttatattgagaaaccaaactcatgcttaatgaatctaaagttcttccaagtgttttctgaatgatttggtcaactcgatatttgcttttgagattaaaacctacggttttcaaaggtcgtgatttttttttcatttcattatatgtaaggcttgtgttatccttggattctgggcattctgcgatcgttaattttcacatattttttgtttatatcacttgacgaagtgtatgctgaaatcgcatcctgtagttacctgatgttagtttctattgttgccttcgtaacaggaggaagtgagatccaaaatattgtctttggagac

SEQ ID NO: 14049 - DNA, 837 bp, Mimulus guttatus
  Intron number 1 from transcript mgv1a004935m (locus mgv1a0 04935m.g) derived from phytozome v7.0 (chr-ID scaffold_37; pos 1004566 to 1005402 reverse strand)
gttttgtctttggcactgcttcttctgcttatcaggtttgttttttattttttaattattttaatttaaatttttctgataattaatatttttgttacatttttttttcaatttgcattcacacttgaggtatatatccacaaagttctgctgcattatttaataattctttccgtttcttttcttttctattttttttcattatctatttttcttcttttgataatcatcaaacataagtttttgattcttttcttgtagtttgatttgattggtcaattgaaatagtaaatttatagatttgtattaattatccactgtcattattaaagaatagctcaaatttaaagttttaataattcgaaattaattgtcattaaattctaagaatttatttctatgtacttcaaatcttatataaattcagatataacattaaattcctattcctatctttacaataatttgtgttcacatgtcaatttgaaattaagttttcgaataagtcgaaactaaaaataaactcgaatatctcaaaagaatgatcgttcatagttcatacttattgtatgattagttagttccaacaacatttttgttgacaaattaaatatcttctttattaatctttttatgcaaatcatgtgtatatcaatactagtaattctatattttaatgtaacaattttacagacatatatttataaataatctaaaacccgaaaatagaaattaaatttctatcatataaaacttgtctggtttattagagtggctggtttagtaattaactatattggtaataaatttgattttttttttattatatttttcagt

SEQ ID NO: 14050 - DNA, 1540 bp, Mimulus guttatus
  Intron number 1 from transcript mgv1a007588m (locus mgv1a0 07588m.g) derived from phytozome v7.0 (chr-ID scaffold_247 ; pos 146065 to 147604 reverse strand)
catctgtcttttacaggcgccagattccgagtcaggtataaattcgtgagacgattgctattttttttttatgttaagaggttgataggttaaaatcttaatctaactaactagaactagtgcatctattaatctagaaacaagtatgacctttgcatcgaaattcgtacaatattgactaggtatcgttcaacattgtaatggcaaatcaagaagacgagacttgctgctaactttctattatatggtaaaaaaggtgaaatcttgtaatttatttacggttttcgatcttagcccgacatgggaattggctttagtagagtgaacttagttgtgtccattgtagcgtcttgagattacccgatttcaagattgaaatgctatactcggaggattgcttgacgggtttttgtttctctaatgaaatccttgcacgagagtcagcaatagtccgatttttcggctctaaaaacagggttgatattttaaaaacaggattcagtttaacatttttcctgaagtatcttagggaatacgaaagcaaatatgtttttttcagacttcaaatatgaaaacatttccgtactaagaaccgtttattagtatactaccacagaaaaccaggcaatcgagaagacattttggatatggtttttatgcctcgataagttatacgacttgtttcttaggaccctgttactcacatttttctcttcattcttcgataactcattttcctgagtcacccttaaatttagggcaaattacggacaccccttgaggcaaagtcaaattacgaaacccccccttctctttgggtaattacaaccacccccaactatgtattgtcttacacgtccacccttgtggcgtcaaatttacctactgaaggatgggttttttcgtaagacaataatacatagttgagggggggtggttgtaattacccaaacaagagggtgttttttcgtaatctgaccttacctcatggggtggccgtaatttgcccttaaatttatgactggagtcgtatagaataattgttgttctttaaaaatctatgcattattcatcagtatttttattttttttgtttcagcaagaaatattaagaatcattctgctggtttcgattttccgatattgtagatggtaaataatgaacggtagttcctctgattgtgtatgtatcaagattctcgaaaatatgcttgagatgattataatttgacgaaaaagatgaaaaatgttgagatgatgcctaaatactcaccacttagggggtcgtgtgctaaaaaaaatgcatcatagtggggttttttgctaatatttataaaactacaagttttttagcaattcgatataacatagggggtactaaaaagcaataaattcgaaaagaattttttttgccaagaactgaggtagcatgcttacattgcccttttattaatcttattataaactctgaaaagaaaaaaaatgagaaaaacattgctaagaaaaaaatacatttcttcattttattttattttgcaga

SEQ ID NO: 14051 - DNA, 974 bp, Mimulus guttatus
  Intron number 1 from transcript mgv1a005810m (locus mgv1a0 05810m.g) derived from phytozome v7.0 (chr-ID scaffold_124 ; pos 659329 to 660302)
atccaattacaaccttaatcttctcagcttcccaggtatattttagtctatttatttattattatttacattctataatttgtatattattattattgttattgttgttgttgttgttgtcgtcgtcgttgtttcttgaggattgtgatgcaataagtttgttgtatgagacgtgaaaaattccaatttggaatgagttatttcattttcaatttttgaaatttcgattgccgattctcttgatattttttgacgaaattgaaatttattttcactttcgaattttttttctgaaactttttattctgatacgtctgatttccacccctaatgggatcgacgtctttgatttttatttttacgctttctagataactattcacatattttcgaattgaacctaaatctgcttattttcttcatttcaatacccgttgctagacaaatataggtgtaaaaatcgaaactatcataattatcattttcgaaagaaaaaaaatccagtttctttcgaaattgaaattaattccaacactactaaaaagaaatcggaaaataagaaatttgaatgaaacaaaattgttccaaaacagtttttttatttggatcgggatcgtcaaaattcacaaattccattttcggtcaccaaaatacaaactacagaataaaattgatatcataagtgcaattttcaggaaaaagaaaaaacttcggaaatatttactaaaattaaaattggatcgcaaattagaatcttatatattctcccaaaagaaatggtgggaacttttagaattcgaaattaataaaatattattcataagaagtttgatggcccatgggtccaatctgctggcccggcccgtagtataaacttacttaagatgccgagttattaaatattcatttatttaaataattaaatgtgttaatattattatatccaggtgtattttctttgaagaggaaggaaa

SEQ ID NO: 14052 - DNA, 934 bp, Mimulus guttatus
  Intron number 1 from transcript mgv1a005947m (locus mgv1a0 05947m.g) derived from phytozome v7.0 (chr-ID scaffold_11; pos 1258620 to 1259553)
tgctcttcgcctacgtttctgactttgggacgaatgtcaccgcttacatatgtcctattatgtaaggctatttggtagattttaacagttatataatcgggcacgtatcacacatggtgtttgatatttgtgtttatttttgacaaaatatatgttactctttctttacatagccggcaagttcacatcaaattagcattattctttgatttatatctaaaaagttgaagctatacatacacatacatcaataaagaaatacaatcacataaaatcaagattccaattgaatttcaaatcctcacacacaattccaaaattcgatttagcagaatctcactcacaaaaaactcttattttatgctataattaaaaactctcaattgaatttcgaatcctctcacacctctcatcattaaatttcaaaattacgcaacattaaaaaaataataaaaaatcaataataataaattaagaaaaaaaaaaaaaaaatcgaaaaatcgaataggcgggcccactgaaggtttggagcatcctcacatggagtttgaaatgaaaagaagattcagacaacatctgccaactcaacctcgaccccgctttcccttccgccattaattttttctcttttcctctattctaaacaccaaaatctcactcttccgtttcacagttagagagagagagagagagagagagagataattccaagccattattattattattattttccttaaacaaataccattcaactctttctctctcttattcaactctctctctctctctctctctctctctctctctctctcttgtttcctttcacactggacgaacaatcttcctccgattaaactattccgctttacccattcaatatatacatacatatatagatacacacacacaacccccttttggactcatctca

SEQ ID NO: 14053 - DNA, 588 bp, Mimulus guttatus
  Intron number 9 from transcript mgv1a021247m (locus mgv1a0 21247m.g) derived from phytozome v7.0 (chr-ID scaffold_122 ; pos 393870 to 394457 reverse strand)
aggttttaactgaagcagttcgagtttctcagcaggtgcatattcatatttcaaagtctattttatttattctcacatttttcttttgatgaactggagtaggttatgcactttcctatattcttaggaatttggtctattatccatctccaaccaactgttctattgttttaaaacggagaagtaacatgatgtgcaaatcaaatgaacggtgacacagtttggtaacgtttgtctgaaaccaaatagatgttactaccaaacttatatttttgtttggaatttaacctaaacggtaactggaaccagtgttagtaaaagaccaaacctacgccaaatgattaactttgattcaaataagcataagttctgtcatgattgttgttgaaaattttgttttcagtctttatatttttataggcttagattgtcaccgttaggtttcgcttcagttgtctcttcccttttgagcattaatttaatataattaaatattcattattaactcaacataaattcctaatttattttagcttatgaaagcattcttctgattttctggttttgtctaaattgtgcagtacagtg

SEQ ID NO: 14054 - DNA, 837 bp, Mimulus guttatus
  Intron number 1 from transcript mgv1a019743m (locus mgv1a0 19743m.g) derived from phytozome v7.0 (chr-ID scaffold_124 ; pos 130031 to 130867 reverse strand)
gattcgaaggtttgaactaactcgacttttttaatttttcattaatatgtttctgtttttcttgattttgtttcttcgatttgtttggttcaaaagtttgaaactttacaccatgttgagatatcttatgtgggtagggtttgcgattattttgtgtagcttagttaggtttttgtttcgattctgtgtatgtttaatgtggtgttccttttatctgctgttgttattcgacgagtctttagaactcgatttttcgtttccttcaaagattgtccgaaaatggcggaattgttgatcgaaatattacacttccttttccggacaatagtttttagttcgtttgcttccttgataaggttaatgattatcttgtaatgaggatcatgatttgtgttgttccacgtgtgttcgtttcttttgtttatttattgtcgttggctgaactaaagtgatccatctcgcacgtatatcaaatagtttgatacgaaattaatgtccaaatgggattacattctaaagttgccgcgtgtttttcatatttttttctttctgtttttacttttggcggttacccaaaaataccgacacgtttctcacgagattatgccgattctcgtgtggctatactgtaatagtaccgccacgtgttcctcccatgaatcgtatttgctgccacattgaaacaaaaatcactgcatttgttgttttgcaattatttatctacgttgtccgatctcgagtttcttgtaacttacgcaaacttattgtccagaatttaattttaacttggcaaactttacagactagtgaagcggaagctgcatcgctgagtcagca

SEQ ID NO: 14055 - DNA, 1393 bp, Mimulus guttatus
  Intron number 1 from transcript mgv1a026524m (locus mgv1a0 26524m.g) derived from phytozome v7.0 (chr-ID scaffold_139 ; pos 527795 to 529187)
ccaccctcaggactcttattcctggaacagttaaggtataactgtactctactatctattactgatctgtgctgctgtgctgcagtggtgaatccaggatttgattttttttaaaagatcatttacaaattataggagaatttcggacaaaatcggtgaaattgctaaagatattgtaagtaaataaattaaagttacgagtaccaaagtgtgcatttaattagcaacttacactttcaatctttcccttgtaatttaaccctcaagattgcaagagaagttctctaccagttgaactacaagttactcttgtaaaattattacattttaccaattataacacatatataatatattttttgattggtttggaattttcgaattccgtcaatttcaattggaaaatatccaaatttggagctgtattttttaagggttataaatatagtttgcaccactgtactattactactgtcacatatacccctgtactccgaaatacgacaaaacaacccatgccttccatctatgttacaaatgttgtccctatcaatagctattggaaaatttctgacccaaataccccttcgattgtgtataaaagtgtgcattatttttcactcatttgtactcaatttcctccaaatttcttcctaagtttcgttcccagccctttcttttaaccaaaatttctgaacaaattttatattctagaaattaattttaatttctttttaaatttctaaataaattactcagtttaaaaatgtcttccggtagttcaaattctcaaaattcatattttaggtccaaacactacatgtcatatttttttcgaactatttttgtttttatgcacgtgttcgaattttttttgcccaagttacattgaatttctatcaaataagagtaagggtaatatgtaactacactgcaaaaactaacaccgttagagttgactggtggactggtaaggtgaggggctgttttgtcgcatttcatagtacagagagtatatgtgacagtgacgatagtacaggatgcaaattgtatttaatatttttttttatttccgattttcgattcttcctaatttattcggaatggaattagaatggtaaataaaattaccgaaaattcagattcccaatcggattttagttccgaatatttctttgattgataaaataaaattgtagttctttagtatccgccaattaataaataataaaatattggatagggggatccaataataaatcatgcttttattaaatttcaaaataatgaagagaaataaggaaaacaatttgataatcctagctaatgggaattaatgcagcaagtttaatttaggcacgatgatctttttatttacatttcacactagcag

SEQ ID NO: 14056 - DNA, 1772 bp, Mimulus guttatus
  Intron number 1 from transcript mgv1a008167m (locus mgv1a0 08167m.g) derived from phytozome v7.0 (chr-ID scaffold_159 ; pos 286529 to 288300)
aaaaataaaaatcgaatctttttcttcctaatcaggtaactccattgttctttgtttgtgggaatgtgtgtttcttgggtgttagaaaagtttgaatagatctatgttcttctgttcttattatttgatgtggtctctgttttttttttttttttatgtattaaatctctgagtttctgttggtttgtaatgcatgtgattagatcttgattttggatttgaggttatgtttttttttattatcccagattgattaattgaaaaattgatctgatgatttttacatgcagagccagaaactttgattcattgttggatctaaagtttgtgtttttatagcttttcctgatttcaagaattgatttttatcacgggattcttttgattttttaatattgatttaaattttaattattattaaatttgtttatggagcagatgaaaggttacatgtgtttgagaaatatctgagatatttttttccacttttcacaaagaaaagaccattcttttgtgtctgccataccagcagaatctatcattcaataactttggttcatctgaatttaattgcattcaatatatattaatattataaatatatataatattaaattgaaaaaaaaagtcattcacaaatcacaaccctcttgtgatttgcattattaaatttcaatcagatccagattttctcaagatctcctttttatcggaacttctgcttcgatttcttttcgtctcggcaatttgcatcgaacaatttgtccgaatagaaaatatgtgtgataatctttcataaaaaagagtgtttaatgctgtacaaatttgtttggtattgaaaatgatttttttaattcgagcatcgaacgtgtcacatggttggtatcaaatcagacaagagtttggtgaattgtttctaagaatcgaggtccattacacaacaccttggttttggtgctagtgtttttcacgtggtccttcgccattcaataatattctcgatgttttatttggtcccattcctacatttcttgtatgaactcactatactataatactcttaatattatttaatttgtatgctatgcaagcttgtttttttctcttaatgtggggtttcttcttcgaataatgacggttaggtgagatttgtagtataggtaataataaatagtgggtagttaatggaagattcaatgcctaattaggtcgaatactcgataattctataaataatgctcactcagcctattagtcggtccacagtttcaagattagccatattatggacttggatcggccgtatattgactgttgactaatactcaattatgtatgttgttttagccgcccttcctattcggttacatggttacatacagagatgtattattgattgaaatataataaaagaagcaactttatttttctcaatataaatatcttgcatgaacaagaatattataatgcctgatgtgtcacttagctggctgctaattgtattttttcgttatagtcaaggtgtccaacatggaatagaatcaacttgtccgattcttgtgcgaatgtgctttagattattcttcttcaatttgtctccactagttcgattttactattttttcttttcttttttgaaatttgaatattcaaaagtgatcaatttgtcgaaaagacttggaaatagaattcgtttacctttttggtgcaatgggttactaataaaaatcaaatctttattttttaaaccctctgcagattgttgaacaaca

SEQ ID NO: 14057 - DNA, 2545 bp, Aquilegia coerulea
  Intron number 1 from transcript AcoGoldSmith_v1.023583m (l ocus AcoGoldSmith_v1.023583m.g) derived from phytozome v7. 0 (chr-ID scaffold_7; pos 6566714 to 6569258)
tctacttcttctccttctaatctcaattcttccaggtacccaattcctccttttttttttctttaggtgtttttaatacttcttcttcttcttcttcttacatatatgtttgattttgattccaattgaattgcatttatatagcttaattgtattaaaagttagaagaaaaacagaattttgaattttgtagaactttatagctatagcttaacatggagaaaatcccaaatttgtattaatcgactttattgattaaccaaagatggcaaaggagtgtttgatttcaagtggattaaatgtcggtcgagctctatgtaagaatatagtacaaagcaattagacttggtggatttcagctactgcaattagatggtagaaaataacaatttattttgttgactagagaagaattgctatttgaggagagagggttattgttctatacttaatagtattgattgagatataatgtttgtgaaactcaaactcaatgatattgtgatatgctatatgaacagtataaacaaaatctaatgacgaactaggagtttgaatctaaggtcaagaaccatcacatcttggagtttgtttcacgttagagcttcttactgctgtataggtttttagtttttatctttcgatcctggaaatcgttctagtagaattcatttaatcaagaaaagtcttgattttaacaatttctaataaaatagcaaagagtataaggaatgtggaagggaatccaggagtgtgtggtgttgattgccaaagggttatgactgtacttgtgtttgtttgtacagatttactctcaataggaatgttgtagctattatgtagaatcaattcattggactttgttcttgtcaattggttttcgcatggagggcaaatgcattggcaatgctttgggagttcttaatgcactgagataaatagtaagtgctagtacatttgggtttcctatggctttttgggggttatatttatgggaaaaagatttatggaatgttgtaggtatgtagactgccacaccttcaagagaagttattagtgcgaatattatctggagtctaaactcatgggttagtacaagcaacttatgtgaaggggatgtagtaggttcaatgttacctggagcatggatcgctatggtacatgaaacgggaacgaaaacgtaaaacgctacttgaacaaaacatggtacgatgggggtataggtaattttttttcagtaacaaataaccctaggaaccccaaatttctgggataacgttttggctttgcttcaaaagtatttaaatagttacctttttcactttcaactcatggtactaccaagagaaacctgtgttttttttccttttcactataatgacatgtgtttcaacaagattttgcatgaaacctagcaacataagttggaacattagaaactacgttccaaatcacagatgatccataattaggaacgtgcgttctctgatcgcagatcgctagggggggagtgaattctggtaacaccgagtaggttacaaagctatggtgtctgaatgctattatgtcagcagacctgtattctttgtgataaaaccgatactggatgtagactattagtattcgtccaagtaggattgcatctccaactcttctgtatatatgtttttgccagacgcatgttctgctatcctaggctctaagttaaaattattattgttcaggttcttagcttatggaaattataattctaattaaccaagctagttttgggagggacagtagggttgacttaaaatgccaatgttgtattattaatctgacactcaatgatttgactggattggtgtatcttaatgaaatagtgctgggccaaagttttgcattggctctatttgtctcaatgtgaagctgagtgaaagagtttttggacaattttatggctggtgattcttttacctgtacagagaattcatgagcttattggtagaaagagatgagtgtaaatttttagctaaattgataatgcatttttaatcacaactttcagaattcagataataacaactttgatcgacaaagcttatgtggtggttggttcgatgattcgtattttctcaccccaggacttgtttcttcagtcttcacctttttaggacaatttctggaattatgccaccctattgttttactgaaaaacctcgggttctctcaaggtttcccctataacttcactcttttatactggagaggttttctttagtcctgtcctagcaatattttactaaagacaagagcccgcttggagatgttgaatatatctctgtataaacatgttttgtaggaatatgacatgcatgtaataaatgtcatattaaaatctgggtttcctattattacttccatgactatttttgttaaacctttggattgaattttttaccacatgtagaaatgagtaaattttgtgtaatatactttattatcaattctctccaacctttttggcactgattatgactatgcttttcatgaaccagggtcg

SEQ ID NO: 14058 - DNA, 1372 bp, Aquilegia coerulea
  Intron number 13 from transcript AcoGoldSmith_v1.001182m ( locus AcoGoldSmith_v1.001182m.g) derived from phytozome v7 .0 (chr-ID scaffold_7; pos 1323128 to 1324499 reverse stra nd)
ttcaaagcaaacctgttttcaagcatattcctaaggtacttttgttatatatattccagcttattcattagttgagcacatataatatcaatgtagaaattgctagggtatgtggggtagtgctcgactgtatagcatatagaacgtgatctttacatggtatctttagcgaagtgtataagagcatgtccaacattaaaaacttattgccacatggtgccttcataaaaacgtggctatgagtttcatcgatatccctgaactgtcattagattattggtgatcgtaggattagaaacaagagaaggtataaatttcattctgtttggaccaaggcgaatcagttcatcacgtacgataccttaataaactgttagccacatgtggtaatattgcatggaataatccagtgtctcgttaaatgttgtgagggtctgtaaaaggtttaaatcttggtgtacgttgggattttcctcgagggaccaacagcgaaccatgagcatttaggaacggaaggaaagcatgctttgtgagacccttctgggctaataagataatgaaggatctgagtgacccatcttgttatattgtttattttatttattcggtctatgtgtgttgcatcacgagtgttttattagattcttcaaattttaggtgccagaatgggctatattgtctttgtttttacctttcctttgattgttaatgtattgtttgcttgtatcgtattcagtgatataatctaagcaatacatcaagaagaagtccatatgaagtttaggtagcaactaatctaaacaacccaccaaaacgcaatacaaagaatattgaggctctttgtaagatttgtcatttctcccctttgatgttcttgtagatgattagttatccaaacgaaattgtgttggagaatgcgcatggtaggtaggtttgtcagttactgagagctccacattaggactctgacatgttgcccaaaagtaaatttcgaagtgaaacctgttcgctcagttgaccccaagagtcataccaaactgtcaatggcaggacattcatcaccgaatctgcattgtcccttcctgatttttataatggcctgtgtcggtcactctcacccaatcctgtttaggcttggtgaacatgatgtataaataatagcttatttatccatgacaaaaagaagaagaggcttgtaagtttctttcagacttttgattaagccaacaagtcagttagctgccagaagttttcacattacttctcatcaaaaacttatctattctgtatgccatgttcatcatgtttctacaagaatttgtgttaatgatatatttatctgattttgttctttcttactgtccagaaagga

SEQ ID NO: 14059 - DNA, 1202 bp, Aquilegia coerulea
  Intron number 3 from transcript AcoGoldSmith_v1.006726m (l ocus AcoGoldSmith_v1.006726m.g) derived from phytozome v7. 0 (chr-ID scaffold_22; pos 3429527 to 3430728 reverse stra nd)
agccccaagtagttcttgtcacaatctttgttcgggtaagcacttttactgtaattttgaactattccatgtcaagagttctaggtataatgtaactttctaacacttcattcccatagacaaccaaggttcttggcatagtctcgaagtttttgctgaaaacactctaccatgaactcttggcgcccgggccgccctgagttttgggtggcccaattcaaattcaaacatagatggcccacatgggtagctacatttcttgtaaataaattaggggtggaaatcagactgaacggatcgaaaatggcatgttcggaaaaaataaatcagaatcaaattttttttttcaatttcattttaatttttttcggaacaacaaaatttattccaagttcggaatatcggaaaaaaataaattcggatcaagagctagtattattgaaaattttgaaaaattgaatcagattagtaatcaaaaaaatcggatcggattcacaagactagtgacaatgttgttccatattttttcggaaaaatcagaaataaaaaatgcaataatctattccaaattcaaaaacaaatcggattagaaatcggaaatataggaaaatcggcagaaattttacccctattctaaacacataagaaaataattctagtgaaaaaaagaaagaaagaattcttaaaaagtagtacttaaatattgatcttaggacattattgtggtgtaaataattatgtataggttagagtaaagattttgtggccactttttttttaaaaaaaaaattggttggccccaatcaagagcttcttgggcattgcctcagggcaaccactgcttggcgcacatgcaatgaaattaatattgctctcttcaattgggtctgcaggcgattttacctaccaaaaataattgtagggatgataaaatcgaaaacaaactaattaaacacctcagtcgatcattattatttcaacactttttgttttactaatggtatacccctccatatacctcattaaaaaatttacatcattgtcactcatactcaaggttttttttttttttttttttaggttttcggacacctataatgcataattattctggggccaaaactattagttgattctgtcgactgtcaactgctttatatataagctgaaatgtaatttgttttgttgcaggtaaagaaaca

SEQ ID NO: 14060 - DNA, 1616 bp, Aquilegia coerulea
  Intron number 1 from transcript AcoGoldSmith_v1.024033m (l ocus AcoGoldSmith_v1.024033m.g) derived from phytozome v7. 0 (chr-ID scaffold_7; pos 3424823 to 3426438 reverse stran d)
tgattgtagctctgctaagcgtggtggtgatttaggtcagttttgatttcttactattgatcgatttcatcactcttttatgctagttgatgaatttctaaatctagttaattgaagtgtttttgtgaattagattaatgtttgaaattgaatacgatttaattgaaattattaagtttattcatgttatgtgtcatgttgtagcagtatttggttgtgtaatttgccgagatgtcgcactgctgacttagtttaatctattattattgttaatatgttatggatgtgttgattattgtggatgatgtgttagggggatttgtgtagtgtctattgttaatatgccaacttcgtgatagtattccgaatttcattattgttcgatgattaggcataacacattcaatctgtaatacattattgaatgtgttatgtctaatcatttagccttaatgtgtaccagtctgattgaaatgcctgtattggttaggtggatgtatgcaatctaacgattttcctgaatatgattagacttttttcattttgacaaccacatgcaataaatcaacaagcagaaactaaagctgctggtgaaacactataagattttcatgtgatgtagcaatgtagcatataaattatcttcaatcaccatcttttgactaatatgattatcgaaggcgctgaaactcgttaatgctcttataaatggaaatatagccacaatatttctggatatacatgtttcaactgtgttggcaacattaggtttctttttgtacatttacgaagtaattgtattgtatgtcgacaaatgtttaatctttacgagaagcttaacacccctgccccttctcttttgaaacatcaatgtttgattgcttttagaatcttatgagtggtatcttcaataggagtggtagcaagcttcatagttctatttgaatttggttttgaaattgttagacaagttttttgtgtggaatcgaaaggtgatttgattttgtatttgaatgacatttgaataatggagcttatggactaatcttgaaatataggatttcattttttatctataataacgtagatatatttcatttataaatttttgggtagatactctaaaaaagcactgcaacaccattggagcctatgctcactttgaatctgagaaacaaagcttcattactgcaagctaccagtaccatttctctggtgccacttaaaaaggagtttgattcctcttacatgcttcttgtccttacaactctcttaccagacaatgtcaataatacaatagctttgtcaaggcttctttctgactacgggtctgaacattttgaattgtttattctgctacttccacaaaatgcttcatgcttcaaaacttgtgaatcctgatcttggttaaaattttgaggtgcaatatattctttggcatctatcttccaagtacaatagaaatactttaagtcttttaaatgtgctgtctgatatattttcttttcatcagttgccccattatggcctgcttaacttgtttttgttatacaactgaagcaagatttgtcttaattgttgttgattttcgtgcaggtccttttggccggggccag

SEQ ID NO: 14061 - DNA, 2599 bp, Aquilegia coerulea
  Intron number 2 from transcript AcoGoldSmith_v1.007364m (l ocus AcoGoldSmith_v1.007364m.g) derived from phytozome v7. 0 (chr-ID scaffold_36; pos 1946728 to 1949326)
atctctgcaggtttcactttctgtgttactttctcttttaagttttaatttttttttccttttaatcattgttacactaatgcaaatcttactgtttgatggaatacaagaagtattttggactttaagttggtaaattctgttaactaattgaacagcaatagtaccttaacttatgttgccaatgaaatgaaacctgaatatgtgtttgattgaatagaaaaattgttccctgctaaaaattttattgtaaattccattctataggaattatgctaggaaatattttgccactcgcaaggatctatacttaaagggaaattgaccctactctcttggatgggggaggggtgggatttttaaactcaagaaaggttcctatatgttttcgaagttgaaaaaaataaaaatgctaggacttctttatgttatacaagcctaaaaataacatcagatggcttgaaaccagaactttccagctctcagacgactcttgggaaagagaactctgcactccattcttccagaagctggccagtgctgtcattcaagacaatgtggcgtttgaagtcggtttataaaaaatccgacaccaatctaaccacctgacaatccatgaagatatactgcactgatttttcatgatggtaaaaactacacatcactttcaccattcctttccttttcaaaatgtaagctgtccgtagagactctgccacatggaatgagaaatcaaagaattgatgtgtatttttaatcttccacactctaaaatggagaaaaatagacataacaaactgagagatctaatagaggtttcttgtaagcactacggagtttctctagacaaacatcaaacttttcatatacttaatatcctactgaaatgtaccacattagcatcctatatactggggaaatcctactcatagggaggtgagtctaccttgagactgtttcaaagcaaccagcatggctttctaccaacgatgttgtccttgttaaattagaagttttcttaggcaaactagaggtaaggaaagatgtctcaccccacttaaaaccatcaaggacctcttccgagatggatctggatataatttccctaggatgtctacattcaaattcaccagaagagaagaaagacaataagggctctcacactacttaggaattggcgggagaagcaatgctgaagattgaaacaattgtggacgagataaacttttctatccaacatgtccacttactcgtgaatgtcatcctaccaatgatgtaattgaagaaattctagttggcctggtcattggctttggtcaatttcttctgcaaaacactttgtatagcatagacaaatcccttagctaaaaagagtttgcagccatccccctcatggaacaacttttatgtgatggtaaggcaaagccaatcaggtcaatggtagaagatcactaatactctccacatcctcaaccattaagatcaacacaaacaaatcgttgtgagtgggggctaaaaaatatactgcactgaaatggttcactgtacctacaaaaccaccaagagtaatctcccaacaattcctgtaaaacctatgaccccccccccccccctccctcctctctctctccaacccttcagcctcctgaacctcatttttgaagatctcgtttgtggagaaattgactactgagaggttttccaaccacaatctttattagatcgggcgaaagtttacaaaagagagaatcacgaaacaattgtactgttacgtgcaccttttgaagctgccttcaggcaatagcggtttatactttatatgtagctcagttttatgccaagggtaaaacaaaccattcccctctccctttccattacatatatgctgtagacatgctcatttacacgtacttttagtaatggcagacacccattctgcttccacacaactttggatttgatgcatttgtgcaataaaaaatatgtatgcaggagcatataatcacagaattggttgtttgtgagccgctacggttgtttatgcacaaaaattagacttgaagggggtgacaagttcatctttggaatttgcataaaaattctgtctattaaacacaacttcatttacaataaaacactacttttgctgtagatttatattttttatttatagcctaaaaggcttgaagtacataaattaaaccttaatatttaaattgataatgtaactaatataagtttcagaaaaaattatgtacaaaaatcataaagagctagttaaatcctcaaaaatggaaactgagtatacccccagtcaattaggtcttcagtttgagttcatattagcgcattacaattattggatccagtgtctgtcgtcacatgtttgatgtttctcactcgtacagatgtgtgttaacataaaactctgtctctgtgtcattggtgaatattttgtttatgtggcaggatgatttgcattaccattataattttatgtgctcatctattaataattttgttgggtaatactactaaagtacgattgatattgatccagtttttttttccttcatttcccgcagtcgttttgttttga

SEQ ID NO: 14062 - DNA, 2376 bp, Aquilegia coerulea
  Intron number 1 from transcript AcoGoldSmith_v1.011910m (l ocus AcoGoldSmith_v1.011910m.g) derived from phytozome v7. 0 (chr-ID scaffold_25; pos 1327441 to 1329816 reverse stra nd)
taattcgagctaaaggtaagttcaatttcatttcgattatataaaatcaatccccaaatgttctagaaaaccctagttttgcatcttagctaatagattacttgggttatttttatcaatttcattgtgttacaagagtttttactttataggttaaaagttccagcgtaattgtgattcaaatacattttacttattgagccacttagattttgttgtaatcggagtgcgagtgcgagcgacctttatcgtattaacaagagttgctcactgcaggagaggaccctatatactatatcctatatcatatcctggagttttgatctaagatggaacttagaacaaaacatttggtgaatatgaaaatcgacattgaaagggtacccaaaggagtataacagtaggtagaaatgtatttcagggttaagggtactttatgttcaaaagttttctccaaatctcttggaagctgagaaatacttactcagaatagtactaataaggtatatacaatcagaaatgtaacaaatgtactaatgttaatgaatgtagtagtcatacaccatcatttgtctctgagatacgatactaattatcttaataacttagtatgctattctaggtaaaacataaccaagttatcttacttccaccattgaaaaagaagaagcaagaaacaaattccaagttgtgtgactgtggatgtttaatgtgagaaactaagatagattatcgaccgacgttaggaggtccatctagagtcgggtgggacttaaactcgtgtctgtcccctccttttcggttttttttttttttaattttttgtttgtctgtctcctttttccttattcaaaatctcttcctacgtgtcacggttctatattaatgagaaataaatctatatcggtaaggtctgagagagaccaattaaggaagagaatgattgatgtaggtttatattgataaacaagggattctaccagcttatttgggaggaagtttgaattcaaagataatatagaattgtgacacggtggggaccgacgttaggaagagattttgaaaaaggaaaggagacggatagacaaaaaaataaaaaaaaacgaaaaggaggggacaaacacgagtttaagtcccacccgattctagatggacctcctaatgtcgatcgaaaaagacaagagaaatttttggatttagggaaatgggatgagagaaggagaaatatggaaagacagaccaagtgtgctcaagagaaggctcttgtagacaaaaaaaatgtgttaccgatataaattaagagcgaaatgttactcaagaaagggacaggtccagagtcttccactaactcaagaagcgtgaattatattaggtttgagtcatgtggaagaggaggctatagaatatgtcagagtgcagcatgcacattgtaaacgcagacatcaaataatgttattagtcaacaaataagtgggcccaagagtgttattctcttgttgaggtcaatgatatatcgtgttggatcaagacctaaataatctatagatatcaattccagatggttgagtatgctgttttttaagaaatgcaaggagtaggttttcatgactatggcgctacttgtgaaagcacaaaatgaaccacaggttatttaaaaaagggagtatgtgtttgtaggtaagaggaggtagtatttatagagtatggagagatgttggagaaaattagagttttgggcagttatgctacacaataacaatgggactctgtagctgtgagtcatttttaataggaatggttgtggaagggatggtagagctggatgacttacaaatcttaggtcctatctctttattttgagttcttctagattttgattttcaaggagttttgtggctaccgttatgttgatgttttacactacaaacatatatatatatatatattatccggtcttcatattttagcatatcatccttagtgatggatattgcaaaagacaatttcacaatatcaacttattccttacagttacatgaaaatatgttcctcttttttgagaaggtcatgataaagcatgtaaaattaacaaatatgaagatcaagaagctagaagcctatatccatgacttgggactctctttagctctgagattgatcaattggcttatagaactgtgttgattatgtttggcaggataatatggttgaaatttcactgcaaagtcttgtttttaagctttaacacatcatgctgctgagaacgaatttgttcacaatttcaattcccttttgtgttgttgtatatacacaaattcttacttgatatacactttgagttctgcagctgagccttcagagaagtctgttgagata

SEQ ID NO: 14063 - DNA, 999 bp, Aquilegia coerulea
  Intron number 9 from transcript AcoGoldSmith_v1.017786m (l ocus AcoGoldSmith_v1.017786m.g) derived from phytozome v7. 0 (chr-ID scaffold_14; pos 4050729 to 4051727)
ccaagaaaacatctctaacacaggtgagtctttttattccttatgccatgaaaatgtgccttgatgctattatgaatgaatgtttgctgcctgtaatatgtcaagaaactcaacttgtttaatattgtctgatcggaaaatgtaagtttgagaccgatagagcattagagatcatactcagaagcttttaaatagaagtgcctatcctgagtaattctttactttctgctccaagtggtagggcaggataggatgatggaactgagccctagagttgtagccatgaaggaaagtatcattattgtacccactgatgagagactcaaatactcttgaattgcactaattttaaatggcaaatttggatgtgttatctagctttagaagagaagatataaaaccactagaacagtcttaaaatacatacgccctgtttactagtctaatttgatcgccgctagaaacatagcatggacaatggtaaatctaaatacaggctccgtatggtccagattttgtcaaagcctgagctaagacttgaaagtatttatatcttattagagcaggtgtttgagttcattatatgactgtgttgagaaattgtaatgagtctatctcctttgatccattgcagttatatattatcctaagtagattaacattttggtaatggaacagcaagaccacattactacattatcatcaaatgttttagcgttattctgggttattgcagctaatgatcaagctaattatgattttgatatacgatttgtgtagctgtgatcattattagattagatatacagtacatgctattgatagaatattgttgccactaactatataaattataccaatttttagtcagttttgttacattattagtgttttactgtttttaattacttatcccactagcaatttagtagagtacgttttttctgacctctttgattgggattgatgtgacagataattgaaaatcttggtggtgct

SEQ ID NO: 14064 - DNA, 1019 bp, Aquilegia coerulea
  Intron number 1 from transcript AcoGoldSmith_v1.002951m (l ocus AcoGoldSmith_v1.002951m.g) derived from phytozome v7. 0 (chr-ID scaffold_2; pos 4236169 to 4237187 reverse stran d)
ttgaatcggtttatttcttcatttaatcaatccaggtgaatatcaattgttttttttttttttttttttttttattgataagctcaacaaattacacaaaagtagtagaggacaaacgcgctacaaactggattcttcaacatggttgtatatctttgtgagatttcgttatttttcaaaattgtttacagatgagataatttaaggctaaactgttaccctgtttgctctgttttttggaatttgatcaagttatgaacttgaaattatttcatcaagcttctcaattgtcatcaagaatcaagatgttttcttattgttatgttttgttagatagggtagtttggtctatgtatgcttactactgtagtactgtataagcattgtggattagatgttgagtactcttatgtactagtatttgctatcaatgtctttgttaataatggatgggaaatccatcaaaactaaactatgcgtctatgtggtaagttgtttggtgcacggttttgatggagcaaacaatcaatttcactgcagaagaatgacaattcttttgtgtcaataagacaatgatggtctgtgggatgtcacatcactcgcttgcttttccctagaagcgtctctcgtttcactccagccatattcctttcatttttggtaattggatgatgctccacagtattatctaacaaccgtgtgggtgacactaggtagaactacatcgttaaaagatcacagaattacaatccacctaagctactgagaccaaatcaaggagtagcaaaatacaacttgatctctaagcacacatgtgttgaacgaaaatttataatgtcctgttttatctttgttatttaccaagtgagggacttagtattactattttccttcttccttatttgcagtataatatgtactgatctagtgggatgttaagtctgccagacattctgagatttctcttattttgatgtgctttagatcattacaaacactgtcttttgctaccgtagaag

SEQ ID NO: 14065 - DNA, 1145 bp, Aquilegia coerulea
  Intron number 6 from transcript AcoGoldSmith_v1.023169m (l ocus AcoGoldSmith_v1.023169m.g) derived from phytozome v7. 0 (chr-ID scaffold_3; pos 1646511 to 1647655 reverse stran d)
aggtgggtgattcctttcttctaatattacagaaaggttttgattcataactctctacttttcagatagtttctatgcccctgaacgtgcaatgaaaatcatccagtttagtttatggatccaacgaaacaagtaatcccaacctttactttaggcgtaaacccgcacaaacatttaaaagtggacttatacgtgtgctgatacttggtgggtatgacctcccaaccatagtgaacaatcattagaaaatttcagctcatggacattcctaatcagattgttattttttctactcttttaataacgttggacttttttaaatgagcttctttttttcttcagaagatgatcttcatcttgggagattatttcttaaaatatcagccctcagttcattgtttagttacagttttagaattttgatgagaggttgcttttgtctaatttcaaataaattgagttctatgtctgatattgcattgttagtaggggtttatgtcaataaaatcctccttttaggcttgttaaaccatgaaattgtgttagtagtgtattttgaaataagtgatgatataagtcatgaaactagaaaaatgctaacagagcactcatatgctgagtgatactctctaaacagtatgctgtgtcatccccatagctagagttttactaataaactcctttcctagaatatctttagcttgcgtggagttgaactgtatggaaacaagattgttcacaattctaaatcctatcaactttccaatttaaaattgaattaacctcttattttccaaatatccaaaatactataaagaacccatccgtaggatgggtttgaccgtttgaaggctcgtatagtagtatgttgtggcacaaggtagattcagaaaattatgtgaacccgatattcaggaaactcgtatcgtgattaggaattttgtttttactgcatttgttttacctctttttttttgaattaaatattgcagaatcctatccattataacaaaaataagtaattctatttaagacttaaagttgcatatttttgctttctgcctcttctttttatactttcctctctcgaaatacccaaatacctttttgatttatttattgttatattattctatctgtaccag

SEQ ID NO: 14066 - DNA, 536 bp, Aquilegia coerulea
  Intron number 11 from transcript AcoGoldSmith_v1.001317m ( locus AcoGoldSmith_v1.001317m.g) derived from phytozome v7 .0 (chr-ID scaffold_14; pos 209374 to 209909)
ctagtgcagttgttgcatcatctttgttggaatcggtgagaatgatgatatgtcgcgtttttaagtgtgcgataagaaaaaaaaaaaaaaaaaaaaaagcctttcattgttcacttagaacatgtttaacaactgcagaatgcataacttatatgtatggataatcaccatcatctacactttaccagtaagtggggtgggcaacaagattctgtttcatcagattaaatctctataaccatatcatagttaaacacccccaccccacccctctggccaaccccctctctttcctaagagccttggaccttcattgaagcatcaaatgtacacactagtgctgttaattgccttttttatgtcaaaatcatgtgtagtttcctgtattagcagagctaatcttctattcttttggatatttgcctttttaccatgaccttgtcttttctattcgccactaactctcaaaatggtttttaaaatacttgaatgtttcttttgttatttgcaggttgaaagtggtgatcttatttcat

SEQ ID NO: 14067 - DNA, 1551 bp, Aquilegia coerulea
  Intron number 6 from transcript AcoGoldSmith_v1.009943m (l ocus AcoGoldSmith_v1.009943m.g) derived from phytozome v7. 0 (chr-ID scaffold_6; pos 7433179 to 7434729 reverse stran d)
aaaaaagggagcaagcgacctcttgttgtagaaaggttagtttttcatatctgcacactcatcatcgacaattatataactccctttgtgccaatttactggacctgaattactcttttgaaagtcccaaattattccttatttacaaagagatcaaatacccccaggttactaattttccctcatttaatgtgcatttttattaagaaatacttcaactttctcggtttccatattctcaaaaattaaatttcctttataatttaaagggtaaattaggaaatgaattgacaaaattaattactcccaacgtcctaattacactttctttatctgcatgaaaaaaccaaatcagcttattaaaatggagggagtatatttaaggccttaagctcaattgcgtgaacgtgttgtggtttggaatagaatggttttttgttaagttaatctgtgtaggctaaaaactcgattcctcgcttgtaatggattgacacttctttcttcggagtgaataacaccattctagatgggtcacttgaaaaatataacttaaggtcattgcagtgacgtgtgccccattaaagtacagattgagctatttttttaaaggagttgatcaaccaaactatgcaactgcgcttatacatataagtttttttctaggcaataattatctggaaaattgcctccatatattcgcgcaattttttcactacatgagatcagttagagttcaataaaaattttacgatttgtagatatgttgtttgttaagtgatactccttccgtcccctttttttccccccaaaatgtagtccactttaccattttcaaagtgatagggtgttgaagtttactaatatacccttatttattttgcatgtttatcaacaaaattaagccctactccaactttctaagtttgaatatttccaaaaccttgatttcttttgcattttcttttgctttataatctctacccctctaaaatttctactccaagaaactactactctcaacaaatcttacaatctaccatggatgaaaaatggtcggtgaacaagtggcctaaaagacatgtttccatttggagccgtaagaattttgccaatatggtaaatttccatttgtagctgcctatgatggatgcaatatgaaaatttccaatttggggccataaaattccgccaaatcttgtgtatatgtgattgcctaaaatgttgtgaattgtattaattgccaatgttaatggaaagaaataagtgaagggtaaattcggaaatgttcatgcaaaaattaatacttttgcattcttaatgatgcattcttaaactgtgtgaaaaacgcaaagtggcctatattaatgggacggagggagtatactatataccatcatctccttaagtggttgtagtatgtgcaatggtgtacattattgatgttattaagttgcatatacagacagcaactgttattagcagttcagcaattttaaccattattttgtgaatgcagcttctttacctggttcagtgagacaggacagagtg

SEQ ID NO: 14068 - DNA, 888 bp, Aquilegia coerulea
  Intron number 1 from transcript AcoGoldSmith_v1.011152m (l ocus AcoGoldSmith_v1.011152m.g) derived from phytozome v7. 0 (chr-ID scaffold_7; pos 3882522 to 3883409)
atttcgacaggagattggtaacaagctaatccttttgttttaaattacatagaatgtttgttgcttgttatccatttgatacattgttacttagtacttctacattgtttttggattgtaagacatttaattgcaaaaggaacaaataaatttgattttgcttttaatcaaagaaatgaaccagaatgtacatactcggtatgtatatgagttttggctcaatcaaaacacatatggaacacattattgtagttgttcaacaaagtaatcacttaggattccaatactgatgagaatatgaatatagttgggcattaccctatgacaatagagatcttaatatattctgtgataaagatattttctctttgaattctaggcttaaggggggttatgatccgaaacttgttcataaatgagagcaaatcggtgtcctgctattagatttttgaacaagaaacaatatgcaaatacggacaaatcactatggtttaaacagtgaaagttagtcggttcaaactatgaattgtgactaattgagagagatgaatgtgagtgtatgacgcaataacaattagagtaagtaaatccctctctgcgtttgtcattttgttattattcttttgatttcgtgtatggccaaaatgtagtatatataaaaataagcgcgatatgttttggcgtcaatcttgccagtctaatgatcaattactgatttgttctgtaaactctacttggttttccttcctgtttccctttttagctttcctctgctgttttaattctcaagattagcagtttttgttttgcagcgctgatgtggttctcaacataatttgtttcttttttgcagcgcatcccacaagcctttctacagtccattacaaa

SEQ ID NO: 14069 - DNA, 4631 bp, Aquilegia coerulea
  Intron number 1 from transcript AcoGoldSmith_v1.011564m (l ocus AcoGoldSmith_v1.010658m.g) derived from phytozome v7. 0 (chr-ID scaffold_15; pos 770967 to 775597 reverse strand )
cggttttcttcaagaggtttctaatcaggtaaagtttatatttatagttttcgtgttgttttttgtttaattgttgtttgatctgaggtagttagtgtgtgttttttttttttaagattttcacttagattgcttgaaatacccaagtagaagatttgaaaatagttggtttttagaaaaaaattgttttgttaagaatcgaattatgttaaagaagaatttagctgggttgtttttcttctagtttattagtttaaaattgtgaaaacgatgtttgtgaaaaggtattaagaatttgggattgtttattaagtttaaaagtggttaattcaccttgttattcacgataagtgttagaaaaatataacaatcccaaattctgatcgtggtgtattggtgtacaaaaatgtcattaagaagttacatcaagttgaaaacatatgtaatagttgtaataaagaaacaaggcaaatcaaacaagtcttctgagagcaaaattgaatctcaggctctgcaaaccatcttccacaacaagtataacaattctgcatataacttaaattactaactccacaggtcacctaaatttgcactgcaaagaatgctagtataactttatagggaaaaaatatggtttaaaaagggattattgaaccatataccttttctgtgtcttgcaaggattgattcatcgtgaggctactctccttcagttgccgtgccaggcctaccatttcatctgtcaaatcctcctgaagctttctgttgaaacaaacaagtgcaaaataatcaaaaggttttcgaaaacatgtataagaaaattcaaagaatgcattgttccttagagctgggtggtatacatcacacaagtacttgagaattaggaaactgattcaaagacaataaagtacctatgcttttcgatgtgtgcctgtgcagcagcttccaacttaacaagctttgatggatcagcttctgtattgtcatggttaacatcttcaactttagggtgagatctgagtaattgaccacgtcattaacgtcaaaattgggtaacaagttgcattgaggaaaactacccatatcaaagccaaaacaacagatgaacttacactaatctccttcgcaatattggagaggaaacttgtttttgttcctttagaggtgcttgctcatccccagtgatatcaacatccagagatcctggcatatcatcagactggcaatatttgccaaagagctgattaggatataatctgaataaaggtcttcaagaactctattaactcctaacaactaactattaaatgcttttaaataaaagaaaatcttttcaccagttaacgaacaaaatttcctttctatttagctttgcaaaaattgcaggaaagctaaaggccatctgtgggactgcatcattactactataggtaatattgaatgtactatgaccctattagggacagtaaccttcggatccttttaggtacactatataatgtaaagaaatgtagaactgaatggagcaacagtatcatgactgttgcagcaatgcagctaagatccaagaccaatggacatactagctttttccgcacagaacatcctatcacgtgtcatgggatccttcttgtcaccacaacactctccaggtctccatgagaaactgaaaccctgaatagaacaaaatatttacacgacgaactctcgcaaatctagattcttttccttgataaagaggatggtgatttcaaactagctcaaaactattacacagatatacccagatttttcttgctcgctaaggtgattatttgaggtatgaacaggataagacacttaacaaggtttggaaagaactattgcctcccttcttgtgttcaattagtcattagtctgtgatcaattgatcattaccatgcccaagcttatcttttcacagtttggagaaaaaaatcaactagaaatagatagcatccctgatatgtttcatttacttcctttactaatgaactgaccacaaagctgcaagtacaacatagaactagaaagagtgtcttgtgggaaagaataaaaaagttgagggctatcaggatcttgcaaattaatgccacttctattcaaataaaatttgaaaataacctttcccataagatcttctcaaaggatagcagtacacgcaccagtggggcagctaatttggcagaaagggcttcgatcttctctgagtagtcattcaccatcgccttcgaaattctgaaaaaaccgacgacacattcctctgttagtctgagaaatgaagataaacgaaacgttgcatgcaaattgtatttacaagaaatattcttgaaacatgtacgaacaaacatataagctggtcattgaagcatggactgtttccttgactggtcaaccaatatgttaacttgtatgcagtactaatatctttaatgtttgaaatctaccattcatactaaaacttattagaatgccgcaacaataaccaaaggcagaaatacataagagcaagaccagagaaagtccaccttggcaagccttccggtgtagtttcttcgaccagttgttctaataactcccgtaaagtagcaatatactagatgaaattccaaacaaataatagggtaagataaaggctccaaaaagaataaaagactcctaacagcatttgagacatgttgtaatcgtctaaaactaacaagctgtatgttacataaaatctttgtcacagttcaaaaccactaattctaaattacgagtataggtccttgcagatctattttcaaatctagacttggttctttagtagtctgattcatatatatatatatatatatatatctataatgagcatataacatatataaaatcatcacttagctcgttggtgactaaaccacttgcttggcatgctagctagatttcccacagaattctttattgagatagatatgtttattattattagttatatcttttcataactttatatgctgtatttttgtttgaactatatatagataaaaagtcccaagtgggaatagttatttcttaatagttgggattggctcatcatgtctatgccactgcataattgcatatatgtgaagcacattttttttttaataaagatgtgaagcacatttgatatcttatgtgtggaagatatcgaattattatcatggaaattagaaatgttataactcccataggttggaagtgcatgccagactaagaggcaacatcaaatgttatacatttaaacacacatatctagccacccaaattaccacctttttatatatatatatatatatttttgataaagaattatttatcgttaaatatctaggtacccagctggcagctgcatatctatatatcttgccagtgtagtgccatgggtggggatttaccgacttaggtatctggctactgcgttggatactttcatgcttgattcagatttgactgcaaagtgcaaaccgtttcacacacaatgcttgttgtttgatgccaaggaatatagcgggaataaaggggtaaacaactaaacaaggcgcgaaagtcatatatgagcccggtctaacaaaagttgtaaattattctaaacagtccggcccaattaaagcccaacgttttctcatgaactcgatgaaaactcttttgcctttctttttgtctcaaagattggaatgtggagaagtttctgaactagattcaattcaatcattcaagtaagttcgatttgcatcagtttctttcgatctctgataacaatttgtttgaatgagatcaattagggtttctttgatcatctgatttcattagaaatacgatttcattaaagttcgttatatgtttgatgaaatgctagcaagataagatgtttaatacaaaacaaaatggttgattgaattagaaagatatctgaaccatctacataactaatttctgtaaatttcttgatttttaggtctagttgattttgaaatgggattcagtaagactgagattaacttgaggaggttgcttaatgccgcacctcgtcaacagaatcatgcaaagctcatacatgtaaggaaatctgttgttttaattatgttaatttatatgtatttgaatgtgtctcggttttccacatgaatagtttggactttggatagtaataacatatagtttgtaaaggtgaagaaggcatgatgaatccatatggattatggaacaatcaacaaaattatttctccatctgttttatccgattatttagatattggtaaataaaaaaatacaaaaaatatgcatagtatctattagtctgtaaaagctgaaatatgattatgcatattactaaatttgctttgactactaaagaaccaagtctagatttgaaaatagatctgcaaggacctatactcgtaatttagaattagtggttttgaactgtgacaaagattttatgtaacatacagcttgttagttttagacgattacaacatgtctcaaatgctgttaggagtcttttattctttttggagcctatatcttaccctattatttgtttggaatttcatctagtatattgctactttacgggagttattagaacaact

SEQ ID NO: 14070 - DNA, 783 bp, Aquilegia coerulea
  Intron number 10 from transcript AcoGoldSmith_v1.002565m ( locus AcoGoldSmith_v1.002565m.g) derived from phytozome v7 .0 (chr-ID scaffold_1; pos 841300 to 842082)
tcatcaacagctgtggtacctctctgatacttgtttaacatatcattatgtatgtatgtattagactagcagtctgtatgtcttttagtacaaactttgtaactagcggtttcctcttttttatgtgtttgattagtatgaactagtactttgcaagcattgcctctttccagttttatatgtagtagattttggaatcttgcagtccgatagaaatgttgacagtgacaatctgatcaaataagatgtgcttattggacaaatggtgtggattttttttttctcatcagagaatagaagttgaaactagggtctggttgaatgctagcctgtggctcaatggtagcacccctctcacaaagtggagaggttgtgggttcaaaacacgtcaacagctgattgttgatataagtttccacacataattgaaaaaggggtaggggtcccctcaaccccgcttgccaataaaaaaaaataaaaataaaaattcttacatgtatttatggattaatattttctctccctcagtccatatatcccccacttataaatttacctatatcttaacctctcatttccaccaaccaaccactgcaacacgttgtttataatagttagatccatattctgatgatcttaatcttggtattgtaattaggatatcttgggatagatgggttcttaacttcttatatctacatctatacttgtttgcttttttgagtgctgtctgcaatggggttctgacgtgtcttatttctcccataggtgttgaagtttttg

SEQ ID NO: 14071 - DNA, 2055 bp, Aquilegia coerulea
  Intron number 1 from transcript AcoGoldSmith_v1.008439m (l ocus AcoGoldSmith_v1.008439m.g) derived from phytozome v7. 0 (chr-ID scaffold_4; pos 6955038 to 6957092 reverse stran d)
acattctttctcttctcttctcttctctcttcaaggttagtgcgttttgttgaatttttcttctcactctctctctctctcgattggattctttgttgtttgattagttatgatgatgatgatgtaaactattaatctgttgtgattaaatttgtttaaatttgttcatttccattgtatcaagcaagcaatgctttgttgattgaatgaaactattgaagactttagtttagtaggaaaattaataaaaaataaaaaaaacaattccacctttttccattaaaaaaagctataaattagcaacaaattgataattgataattaagaattttaacaataaatataatttttattgaataaaacaaaattttattattttagaataatcaagtctactagcaggctaatcaagtctactagcaggcaatgcaaatgagtctcaaaactcaaaacaactgtgttaagaggaatggtgaattctgcagacgagtacttactgcagtgacgtttctgcatagtggttggtataatgagaatagaaatttacttactgaacatttttaggttattcaaaaatcgggagatagtagacacatagatgattatttagtgtattctgagtttttcttaattctcatgctagatggggtgaaacagtttctcaagtctgacgatgtattgtgatttgtgactgtatttctgaacagtagtagtctttttttgtgaaacatgtgatgattagtttcagtgctattgttcatgtgagttaagaattcatactcttggtagatatagaaacactttagttgtgaaaaactagctgccatagtttgtttacatattgataaatattttttatcatgtattcatgttgttgagttaagggtggaaggatgtttaaaatgaaggccggttgatgcctgatattatttcattattttaatgttgttggattttttgttgtttgattagttatgatttatgatgataatgatgatgataactatcaatctgttgtgtttcttagagattaaatttgtttaattttgttcaattggttgtattgtatgggtggcaactagcaagcaatgctttgttgattgaatgaaagactttagttttagtggggaataaaataaaatcgaccttttccttgaaaagcagctataatttttatttttttttagatttttcctaccactatattcgtggggtttgtttgcagatcagaaatctatctacaaaagtatgaagattaaacttgttgttgttgagtttaattgatggtgaagattgtttgaatggggttcattaaatctttttctatttctagttttctactacaactgtttacctatttgcttttggtacttaagagaacttcttatgataataaacttgcacccttagcattcctacagatcttaagggttctaatatgtttggcacattcttagaagtgacaaacacaacgactttagtttaggtatttgatttcatttgtgaatttgattgctaaaagttggatttttttttttttggttagatattgatgtaataaccttgtacttacaaagttacaatctttgtgtttttgttttcggctcctatatgcgtgcgtgttgttgaatttttcttcatgaacttgtgggatgcttttattcaatgtgtcttgacaatgtaagcgaaacatactcagatactatcctcaccatttgaaataaagtagcctctgagcagaatattagatttctgccttatccgttttctaattgttccacaaacatgatgaaacacacacttgggacataaacattgaggcttggaagaaaaattcttagcaagaaaaattgttaaactagtagattagtataagtttgagttcatgaatcatgggcacaaattacaagtttctttagcttggaagattgttatgtttttacttgattttgggttttctactctattttgagttagagtttctattaatttaaaactgcattatggaatgtgattacagatttaagcccgagggttggtcgtcattgcattgcg

SEQ ID NO: 14072 - DNA, 1440 bp, Aquilegia coerulea
  Intron number 5 from transcript AcoGoldSmith_v1.005468m (l ocus AcoGoldSmith_v1.005468m.g) derived from phytozome v7. 0 (chr-ID scaffold_11; pos 6267766 to 6269205)
aggacatatttgaggtacgtatctttaccatcctatttaatgttgggaaacgatagttttaccataaaaagagactagcaattcatttttttggttgtatttatacatcatgaaatatgatcacatttcaagcatctatattaaattaaacaagggatgattgcactgattttcctgactcacttttgacaaagggtatgtttggctcactggaattccaggaaaatcagaacgaaatccctgaatttaaggcataaaattggaaagcaaattatggtgtagctataagttataggattccgggttttttttttctatctctccctcttttgtgcacgagatctctctcccaatcattgtctattctgataccgcctttcgtttttccgggatctagattctgagaaccaaacacactaacaccgccaaagaggatttcataaactacaaactgaaaatctgaagaataagtccattttggttaaattgtatgggtagtcagttgaagtgtatgaagacaaggtaatgatgccaacattatacccaaatacaaatttgacatttttgatcaaatagtaatagatattttcacgctatacagaaactgaaagcagtcacttagagattaatctctgtactcttccatagcatctatgagtccaactcatcccatcctcaattgatgctataaattcgattaccttcaggatcatatctttgatataactatgtggccttgaaaatcctgcttaatggacattattcataagagataatacccatttgaaaggacatttttttcactgcgaaaaatgttgaaatataacttcaaagctgttagcgaacggctaggtgtaggagctgcacattgtgctttggtgcacctaggcacctaacacttgcttacctgctgtgtatgatgtccatcactccatcccacccccacccagcctttccttcagtgtaagtgttcttaatttcatatctattatatttcatgtgtttattattgttatgaagactattacgaaatttagagcttcagctgggcaaagtctttcacttttttttctttttctttttccacaaccataatcttgtcataattgccttttctttttaagaaaggcatctttaaactccagaatccagtcaattctatgtataaatgtttgaattgaaatccaagtgatagcaagatcttgatattactctgatacagaaattggtacaaatatttatcacctggctacaaatttttttataaaattgaacatatcatacttaacggttgaagtcatttattatctttaccatcaaagttagtccagtgtgaaatctcccaagttcttactgcctaaattcacacttttgctctgaagtaatactatatgagctcagaaatttgtggactaagcatgatttttgtgtcacagtggt

SEQ ID NO: 14073 - DNA, 3462 bp, Aquilegia coerulea
  Intron number 6 from transcript AcoGoldSmith_v1.009335m (l ocus AcoGoldSmith_v1.009335m.g) derived from phytozome v7. 0 (chr-ID scaffold_6; pos 3566387 to 3569848 reverse stran d)
ttcggagcatttgcacgactgcccctcttacacaggttcgtgatttataatttgaatagatgttactcctgaattgtttaataaatagaaaaaaatcgtaaacatcgtagcattgaagtatctataattttgctacctaaaaaatttttatgactgcaaaatattgctaagagcgagcaaatattggaccagactaatgatttgaagtcagaaacagtaatttatgaagagtgcaccatccaacaaagttcattttatcgcccttgtgatatgaaaggtaacgtaatgaccacagccttaagttatggacctcgtttcaattcaccatagcctatacacatgccagagtgttctggattgcccacaatgtggcattgccagatcagtagcattaggtgtcgtttgttttttctagcattaagcactgaatacacattaagttctgaatatcacttaatacatcaagtcattaattgattcattctgccaaattttaagacttaatgacttaactgaaatatcagttaaggaaatagatttagtgcttaatggttagtagaaaacaaacagtctgaagactgaatacggtggtccacccacttaagttcagtcacttagactgctgaatgaaaaacaaacgacacctttgtcttgataccaccaaagccctgtggctactttcctactttccctagtggtaaagcataaacttggtgagcttgtgttgattgtaagggtaataataatacaaaaaaaaataaaaaataaaaagaagatataaaacctagtttaaatgtttaatacgtggaaagttcttcgaggatttagaaagacgagaaaaataatgatgatattgtgtaaggccatctagtcaatccttaaagctaactaaggacctggtttatacttccaatttccacaatattgtcctttggtcattttaaattttacaaaataaatgaatgtagagatgttcaatgtgagtaaaaagctaaatgaaaagatagaggatgtctaattgaacagcattggacattatatataggaaaaactggaaaagtaaaagagagggtgaaaaaagaaaagataaagaagtacaggcatgagcctaaaactcaaaggttctgagtggcatgcttcattgtgcgcttctgttgatggggctcaaggaagattcacggccaaaatctatttgcttaggccaaactatccaattgtgcaacaaagtagggtcgaatttccattctatgcaatcaatttatacaatgccgtcaaattatttctaacaggcgttattatttactgatctggatgtttgttatatttttaaatgctgactatgtaattttgattgttgactgtaaaatatttgttggttctctcttctttcaaattctctctcttctgtttctctctctctctctctctctctctctctcgtcatcgctaccaacaaaaccaactcttgttctcgagagaaaactcttaggaacaataatggctacttctttgtctctaacagtttctcaagctcttatgggtagaactatttctcataactctacccttcattctgaccatctttctttacctggtttcaatcacagtactcgaactcttgaatcttcatttacccaaactatttgtatcttgagatctttgcgtaaaagcaataacaacaacttgatttctcgatcttcaattaaagctcaagcagtagagacattagaaaagactgaaacagctttgtttgataaatccgttaatatgattcatttccttgctattgatcctgttgaaaaagctagttgtggtcacccaggtttacctatgggtgggtcatattttatatgatgagatcatgagatataaccccaagaatccttattagtttaaccgtgatcgttttgttctttctgctggtcatggatgtatgcttcattatgttcttcttcatcttgctggttacgacagtgtaatttcaaaggaggcgatgacccacaatagcagttcttgttagaagagttggaatttgaagaagacatttttatttcaagccaaattcttgcagcaattaggtttttgagaattggggattttgaattagggatttcaaattgggaaaagttggaattttataaagtaggaagacgatcaagtgctaggcctgtgccctgttttcatacagtcagcaaccattgtttagacagtcaacattaaataaaaaaaaaatatacagtcagcaaataacaaacgtccgttaagggtcttataacggcattgtataaattgaaaaaacttaaaagtttgatgattaaataagccctaattttgttgattgcatggaatgggaattcgaccctactttgttgcatagttcgatagtttggccatttgcttatcttttttcttattcatgaccataaattatttggttatctgtttctttcttttattcaattaattttgtgtctcaatcagtctgaagttacattattttcatatcaagtaaaaagtaaaaatcatatcctcagaataagcaaggttttcataatgtagaatttttgagaactatcaccagataatttttgagaacactgaggtcaatgtcttactattttactcatgatgggatgctgtccaataagtagttgttggtcatcacgtagtggataatgttggccaacctgatattgtacaatgcatctatgacattcatatatacaaaacacattttttatcttagttattatttttctactatataaaattgtttatatttatcgaggatttgatagaattttgaatatagtcctccattcattaaaatatcttcatggatcagactttgataacacccatctgatctgaacctaatccagtaatagtattacctggaaatgaacatggtggaagatctgaatgataatagattaatagtaaggctatcgtagtcatgagttcaaatttacctctttgccggaaaatagaaaagaaactaaaagaggtataaaccatcaaagaactaaattattaggtaagtattgttatttgattcaacctaaatgtattagtttatatgtacataatagattctttgaagtagaagtcatgcacctttaggtacaaatcatattcatgtgttgtgaaatcaattgtactgtttttacgtctgtcattaggcatcttaacttctgcatctcgatgcatatagaccatggaacatattgctttatttaattaccttgttctgaaatcaatattatacaagcttggttgatgggttttctcagtcaagatatatagagatcatttcataaatgtagtctacagtatatgaaggtcaagaggcagtttcggtttctatatgagatttgtagtctacagtatcatagattggaaagcaatggtagctttataacatttctccgtacattatttatttgggtgcagcgcatcaga

SEQ ID NO: 14074 - DNA, 1848 bp, Aquilegia coerulea
  Intron number 7 from transcript AcoGoldSmith_v1.023275m (l ocus AcoGoldSmith_v1.023275m.g) derived from phytozome v7. 0 (chr-ID scaffold_30; pos 2212093 to 2213940)
caactcgaacaggtgaaggagttgttgagctccaggtctgcagtttctttttgatctatattttcttgtttatctctttctttcactactgaccttatttgagttatatggtgtttctgtttgtttaattggaagactctttttcatctactttatttcattaatcattacacactggaagaaatgaatagctcatggaaactcttaagctgcagctcattttagcagttgcactatacgactttctgctctgccctctttaaatactgccacaatgaattttttcattcattacttcaatacctgctttatctgtatattgggattagaagcatcaatcccattttactgtttaactcttaccttgatccacaacgattgtgtccttgtgatctttagttactaagaattcaccaagtatgcattggtggtttagtcattagtcttcatcctccaattcaaaacaatcacaatccttgagtttcacttccagtgtcatagtcataggtaaacaaagtctttaagccctagaaatgatgaaacaaagctgttaaggctgtatgatatgacacattctaatatgcaagctagaacttttgaaaatcctttagtgcttgaggcaagacaatgtttattaacccctccaaaaaatattatatactgtagacttattgctactgatataaagttccagattaggttaaacttcttaccatgacttttgttatgtctcttattccttaaatatgatctagaacaataggttctggagaagcattctgtggtttcatggcatttttgtttgaaagtgattgtggccaagagcaaggtcatcagggtggataggctgatgtagataatcttaccttattgataacatgcctcgatgacaactttctgcttccatcaaactacaccatcttcaattgcagactaagcacattacattagctaatttgttggccaaccagtaccgacataagacggatttaccatgatacataaacctcaagttatcgttcgaatattgcaaattatgagcgagactggcatgttatggtaaaatggaggaatttgcagtactaatatgaaatattgaatttttttttgaggaaccccaatataaaaatatatgatattcatgaaattttacctcctagacttcattgtgttggccgagaatttgcagagagtgaaatctgtggattttaggagttagaaagaggttcagtcaaatgcatgcgaggtataaaggttgattcctctcgatagtagattgaataattttgattatgagcaccattctagtttttttggtgtattcaatgtcccttttcaagtgcccaagagtgcgcttctcagcatccacttctttatgatttgggtttgtaatagagttgacctttgctgataaaagaaaaagaaaattttaactaactcttgacattttgtgatcatatgtgcgtccattaggaaaaaaaagtgtctgatttgtttcgcttgttgtaggccgtctagtcaacatattgatgattaatgttttttagctatcctctctaagttctggtttggttattattctagttaatatcaaagagtaatgaaatattcttactaaattcatatccttctattgtatttaaaattaatgttgttgttgttgtagctttctctcacacttgcactctcatcttctaaacacaattctgatttctgcataccattattttaccccgagtgcagattttttattttgatatgttggtgacacctgatgggtttagtgtattaagttgactgttattcttaacaggcaaaactccctcaggctcgtgttgtctattgctc

SEQ ID NO: 14075 - DNA, 684 bp, Aquilegia coerulea
  Intron number 7 from transcript AcoGoldSmith_v1.015895m (l ocus AcoGoldSmith_v1.015895m.g) derived from phytozome v7. 0 (chr-ID scaffold_5; pos 3326572 to 3327255)
gaggtgggggaaagatagttatcgtaaatcttcaggtataaataaaaaattcatgtctgtaatataactgtcgcagaatgtaacatacatgttaataaaatctggtaggatgtaaggcttctgaaaaaaaaaaaaaaatgtgaagaccattggttatttgcacgaccatccttatttggattttaagtgttataatatatgtattgtctttgtaagtctttttttccagtgaagtttcactgcctttttgtaggtcactgtctacatgtaatacattatgccttgatcttgcttgagtccttctctaaccttatgttaggttgtacactactttttaaaatggatcaagatgcaatcatctcactaaggcatcttgattaatatacacctcccatgaggccccgagtgcctgaaaagacatgcgtttccaatcagttggaatattagcctgtaatatttgaggaattgtattgtagtacacatctttggagataattatgtgtatatactttgtgtgagcgtttgtggcaagcgatgactcctaagaataatcttttattttaatctgatatcggttgtgttaacttcatgcatttagatgtaatttcttttatgctaataactttcacatttcttgttgattttaaaggatactccaaaagataaaaaagcaaatttggtaat

SEQ ID NO: 14076 - DNA, 1424 bp, Aquilegia coerulea
  Intron number 1 from transcript AcoGoldSmith_v1.011959m (l ocus AcoGoldSmith_v1.011959m.g) derived from phytozome v7. 0 (chr-ID scaffold_3; pos 10252407 to 10253830)
ggttcaaagcaggtataattttctttctcatcttcatctcagatttgtgaatttttagttggatttgtttttaattgatttgaaattgtgaatgtttaatgtttcaacaataatctatttgtttaatttcagctttaatttgttttttttaagctcagatttagttttcatttcattatgtttctaaatactaaatagggttgaattaaccaaataatctatttggaaagtttcaattttttttgactaatagtcaaaatggttttttgtttaaaatattatgtttttcgagacttgatttgaatttgcatttataaatgaaggttgaattttcaaaactttgcctgtttttttagtcttagacctgatattattacttaccagttgttgagcatataatcaagaagcaagataacacttgtctcacattgtgcaagtcattttttttttttttttgcaagtgtagggacaggcttttaatggtactgttgagattttaacagctacaaactattgtcctgaattcaaaaaaattgtgataactgataagcatataattgtcaggcaataatccttttcatgtgtaggactttctctttatttcttgttttcatctctatcaagttgtaaatgcaaacaaacaaaagcatttagcacccaaaggtctttctgctaaatgacaaacaagcttgttttgtgcgagctggctaccacataccaatatgccctcccttagccacccaatggatcagaggtgatagacgatagttgtgccaactgccaaacttagtcccacttcctttaggagttgtcctaaactttaaacataaagaatgatggataatgtacttatcttgaaacattttgaaggacagtgacaccaaattgtgtaaaatttgttccttgaatgcactttgaaaggaataaaactggaatgggtgagtgattaagttgggacattgcagatgtcttgagtgattaagttgggacattgtttgtgttttgcgatctctatattgaactgtggacaaagaccagaaaaatttccaaattacagtccttgcttgtttgtttttgcatcctgtttgcaatctcttattttgtgaaaagaggtaaaaaaaaatcattgacttatttgaagcatctggaatagtgccattcaggtgcatattcaaaataaattattgatataaaatgttttcataactttgacttcaaaagtattggttgttaatgtcttcaacttggattaaattatagttgcctgctgagtgttgagctatttgaggtaggatataaagaaagtctgctttattctttctttgcatgtattgtttctatatcatgtctaatctgcttttaaaagatatatcatgtactaattcaagttcttgctgttcaacatgatgatcaggcaacaaaca

SEQ ID NO: 14077 - DNA, 1747 bp, Aquilegia coerulea
  Intron number 1 from transcript AcoGoldSmith_v1.005437m (l ocus AcoGoldSmith_v1.003299m.g) derived from phytozome v7. 0 (chr-ID scaffold_11; pos 3718495 to 3720241 reverse stra nd)
aacaagcttctctgttgctataccaggtaaaaaaaaaaattaaaacacaccactattcacaaaatcatttttgtacttttatgcagaaatcttaattgggttttcttcctctacaaattgcattttctacttttatgtaaaattaaaaatggtatcttacctaccaacccctttttaaatgattagttagttcatacagaaaccaacttatcactattgtttagaagttggtgaccttaatttgtcaattttgtttattgatgtataataagtttgatttgtgactgatttgttaatggagatattagtggttagattagattacatacaattctggtgttctttgttcactatttcctgctaaaaatgttgcctttttaaggaaagaaacgattaatgtgagtcccaaatatgtaattatatatctagtggttagttagaggtgcaatcatcaatcttgcacgcaagaaatagtgagtcacttgtttctcatgcttaacaataaaacacaagaaaaaaactatcccctcttctagcttataattgcatttaactgtttttattttttcgctttccttttttgcttttattttacctctttttttagtctaatctttcatggtacctccttccatcattatcccaagtcgtaattgttttataatttctaaaggcttgttagatgtgcaataatcaatcttgtatggtttttttacgcaagaattggtgaatcgtttgtttctcatgccccccaaaaacaaactttagagaaaccaccccaataatacataccctaattagttctttgttcctttctcttctcttatttgtgctttactcatggccctacatatggtatacgcgttcatggtatttccttccattaggctatccactttgcaaatttttaatttccgaaaaagtaacagggttgttgtgaaatcaagcaacgggtctcatcctcccgtaaagagatcagactttcctcctgattttgcttttggagttggtacctctgccccgcaggttttgtgttttgctttcatttaattcgcttgtcgaataagttttattgttactcaagtgatcataactttcaccaattaactagttcttaattttcagatcatgaaatttggaagtcgaagtatcgaacattagcataaaattataaatttatgtgtctatgtgttgccaatggtttcttgcgtggtcgaggcatctgcataagagccttagcaaaaggaggcagatattacaattcgagtgcttggtgcttgccatgccaagtagaataatagattgtaatgttgtggtctcaacatgagatttatcttgtattcttagtaaagaagatgggtggggccccttacaatagtaaagaggaatactaatacgacaataccatctatgctgtcagggaattcttgttccatcccaatttacctttggttcccttgccatgtgcaaggggtataatctcacgcatctgttgcatttgcgtacacccttataattgttattgttgtaattgacattaatctatatctttatgccatgtgtgagtaactctattttgtgcatctgtgccatttcttacattttcataaattccactcacctttgatgaatcaataaactttttttttttaattctttaaatattattctttccttttttttattgtaaactctctcttaatggttactcttaattgactgtagagtgaaggagcagctaaattgg

SEQ ID NO: 14078 - DNA, 1646 bp, Aquilegia coerulea
  Intron number 1 from transcript AcoGoldSmith_v1.003091m (l ocus AcoGoldSmith_v1.003083m.g) derived from phytozome v7. 0 (chr-ID scaffold_25; pos 610888 to 612533)
ttcgttcgcttaagtctaattagaggtgaaaagaaaaagtcattttatttgattttgttttagtttgtttctgattgctttctttttcattttagtatgtattttttgtgtgatttgtttctcgaagtaatgatacatttttctattcgatgagaattaatagagtgaagattaattagggtattattgatcaatattcttaattttccaaactttttggtctcacaattccacagaagtgatgttcagtagctttgtttaataaaggaagttgatgaatttaataatcgtttgtaattgcgattaggtagataactaggtttgatccagttacagatgtaataactcaatctactatctccacgtagtttatagtttcaattgcattacaaaaacttcgttgcattgtttagacacgtggaaatgccactggtaataagtgaaccgcgtgtgagagaatctcttagaatcattctattaggactgcagtttgcacattttcttggtcgcatcttagattgcagtgatttagatcttctcatactttctgtcaaacacaatgcaggtcacccagtttcacccttgaccatataaaggagtactaaaacaacaagttagataactaagttgaaaatactagttctacacttacaagttacaaggttactaatagagaagaaaggcaaccaagtgttcaattgtcagaagagttgagagttgcacacccgtagatggaaagattttcctctcggctaggtttcattatgggtacgtttggttcactggaatccaaattccaaacgctggattttagggacgaaatcattagatattaggaatgagatcggaaaatggattccgcgcatgtgtagaattaaggaatatggtttccttgattaaaaaaaaggaaactagtttccataactggtgttacaaatccatcaaatgatttattttcatcagaattttttctccgtttgggtatctccctcattcgtggctagaatctgtttccatacaagtctttattctattaatgccctctattttcccggtatctgatttctgggaaccaaacacagcctatagtttgccaaattttatttttttgagcattgtatcctcgaggatatcgttatcaagattcaagtttactagttgttgtaggcctttagggatataggtggtggagtacttgcacgattattcttttcaataacattatttccgagaaagtctttaagcttgcaacttgtaagagcactgatatgagctagtttactttatccatttgaagttaataccatcactacttttaggacccttttattagatcaagcttttcattttctaagttcaggagtgatttaactcaatttggccaatatcattttgtcactcatcagttacaacgaaatatgcacttaagcgtgatatggttttatgctgcattttgttaatctatatgtaagtctggtatttctttcaaagtgccattatattcattatagccaatctctggaatttttcagctacagagttgattttcatacattctagttgtcttcttcttacaatagtatatcatttacttcattctgatatttattttctctcagctgttcattctccttctcaggcatcac

SEQ ID NO: 14079 - DNA, 3306 bp, Aquilegia coerulea
  Intron number 4 from transcript AcoGoldSmith_v1.005714m (l ocus AcoGoldSmith_v1.005714m.g) derived from phytozome v7. 0 (chr-ID scaffold_18; pos 3918520 to 3921825 reverse stra nd)
caaacttattcggaaggagaaggtttgtttaactaagttttcgggccttcttaatatttcttggaatacgaaagttaaaatgttagatttgatgtactacaactaaagaaaacttactatggattcagtccacttgttagagatgattgttagtttgtcacaatgctcatgtttgtgtagttctgtttgaagctggtttctaatgccgaatgtgtttctccattcttatatgctgatatataattctctctcacacaaaatcttgcagtcttgattattgttaattgaactacatattgcaaatttgcgatatatatactttgacatctcaattctacatcccatcttgacatcccagtttgggtgttagataagttgattccagcggttacagtttggtagttgtagcaatatatcttttccctcatctcatcttcccttgtgaatgttgagtttccatcttcatcgtctaggcgtctaacgtcctttcacaaaccaattttaaaatccattaccttccaattttacctttatcgtcatttgtttttgaaaaggatcgacacgaaccaatgaggaacttggttgtcaatattatttgaggagctcaaattgaacctaatctagtgaactcatattgaatctaatctagttaagaagatgaaaacagtcaagcaaccctatatatatatatatatatacgggctgtctaggttgccatccttagaatgacattaatcttgacagcccatcttgattgttgatttagttaagatctaatggtcaggatataatcaacaatacaactaaaaagactaaggggtaattttgtcactatgctctctttcttccctattctcacaaatcgaacaaacatgagcgagattgcaacaatccactctcaaatctttttgtttttctcgaaatcaaatctagttcttcaaagaattgaatatgcatagtactttctggttggcggtgaagatctagaaacaaaatttatttccatctcatatataaacattagttctgacatttacaatgaagagatcatgtcgacgaaaactaaaactaagtgttaattaataattaatatttggggtttgacacggataattgagaataaatggttgtgtaccagtttaattagtagatctgttcatcaatgaataatgttatgaaaaataaaaaaaggaaggtagcatacaactttacaataaccctttagtgaaaaacccaatgtagaggatagaaaatctgttcccaactcattcaagcagatgaagtttctgtaaatgtgtagttctaatgtgagaacttcatttggttgtcgtgaaatccaaagtgattttagagaaagagaagaagaaatcttaaattactgaattgtcctttgggttttagtttattatactaggagctatctcgactgttagatcttaactaaatcaaaggtcaagatgggctgtcaagattgttctaaggatggcaacctagacagcccgatatatatatatatatatatattgtagtagctagagaaatatcattaagagccacagttaaagaatcgagccaagtcgatgaaattcactttctatattaaaagcatgatttttgtcttgtttgaactttgaatagtgtatagctggactatgctaacctggtgaacatagaagcagtgtaccgtttttttgttaattttcctttagaatatcagttgacatataggattaggggataattataagagtgcgaccatggtatggctgagtttctggagcaattatctgggtagtggattgatggaggtggcaagagatgctactgagtgatactttgtttgtgttgtatgattgggtctgtatatgagggccactgtatccagagcagtacttgttcatatgagcaagaagaaagagttggcaggtattgtacaaagtgcagatttgtttcttatgtctgattctctttctgtattgattttgtaagtcaagtggttgtgcttatactttttctggatcttgttttgggttgaaggatcagcacccgtacaaagaagaggatttttaatttcttttttgggtcggtaaaacagttcttatatcagtatatgtagtccatttggaaacttgccatatcccaaaatacaaaggtgaatatcgatgcacagcaaatataacttctcttcccatcaagttagatctctctcatagtcaccagttggtaagaaggggaaatgcatagggaatgctttcattcatagaggctccagtcaagagatacagtgtgtattttgggattttggtgaggtgggtgccagtatagttgctatttttgcagtggtgagtggtgatgatatggtacatgcaaaactaggtttggagtcaacaatgatagtttcagaactggattttgtgttcttattttttattaaatgtacttaacttcagaagtccatgacgatcggattatgtatatttagctagacaccaggaaccacacaattcatcgtcctcgcagaagacccaaaatcttctcgtacaaccaaaagaacccaactgcaagttacaaatgaccccacactcccttgagatgctttccaccactgcactggatccctatgcaatgccttgggaaagcaacatcatttgatcatgctttgaaagccatttcataattgcaactgtcaagggtgtgtagcagctcttccaatatctattcgaagacaagaaatgattggatgttaaatacaaatggattataagtaagagacctttgccaactctttaatatttatatattagtatattccgcagaaaccaatgatcgaattcacaacacatttatgtgcctactttgaagctaagtagctatttaacaaaaacaaccatttgctaggagttatactagcgtaggagtcagattttagctgtacctacatgtctgactcatgtgcacacaattggatgagcttggtttattagatttagctttctcaatgtaaatgttattttgtatccatgtgtgagtgtgttatttatttatatttgttgggtgggttgggtgggtgtgtgttgggggggtgttggtgggggtggggaatgggcacttaagtcttcaatgtaaccatggcggtgctctttctgttgtttatttgtctgtaagtgtttctctcttccttcaataaattgatttgaattatctgagagactttgtataaaagttccatattgttaacttttttatcatctaatcactatcgttcgatcgtttttgtttagtcatcgtttggctttgtggattacc

SEQ ID NO: 14080 - DNA, 1369 bp, Aquilegia coerulea
  Intron number 18 from transcript AcoGoldSmith_v1.004853m ( locus AcoGoldSmith_v1.004853m.g) derived from phytozome v7 .0 (chr-ID scaffold_10; pos 577096 to 578464)
agtgttgaaaatagtgcgtctggagaaagttggtgagttttactatgtttctagtcctactcattatatagaagagcacactgattaatgagtcatgcgaagttgcgaaccattcagaaagcatttatctattccaaaataaatgtagctcaacatgttgacattatccaagtttttatatcatagaattagtatactgtagttagtgtcatggtaatgataaatgcctatttcagtcaaatatgtcttgtagtggagatattgtgacctcttaatcatttccacacttgggctagaagttgagagctgtgcacatctcaatgagaaagttccaatggttagcctgtgtgggagatcctagcttgcgttacatcaacaagagatcactggtagacttagggcatacccgcactaaactaattggtttgagagaatcagcccaaacagatagagaaaggtcactggattagcaggtcctccaacttcccagaggtttatccaactataagcaactttctgccaatagttgttgcttaaatgtttgttttcctgaatggttgttcgaatatagtgtgatattcaacatagctgaaaaggcttatatcttatcgattttcaaaatacttgtgctttaataagaagcttcagattttttaggatttaagttgatcatgaggtaaatcaatattcaaatcaacccatgaacaattcaacccaaccatcataaaccatctccgagacataaaccttttggatgcaaatgaggagcccatatttacatcgtttagattttggtcaggttgaaattggtttaacatgatccccgaaggcatacaagacagaagacatacatataggtttcatctaggtagatatagagtggttagtttatgttaagtttggggagctaaaaatgtttatcattactgtatcaatagataaattctcggttccccttgaatgtgactcttctttaggtgacccatcgtgttttcattggtgccacccttgagtggaataacttacctttgctatttaagtacgagttccttgcattataattttcttcttgccaagcttagagacaaactactaatgtgaggtcatgtgtaaagtaggttcatattttttattttttttttgagggtagataagtaggatccttgcactattattatatggtgctgtatcagtaccctttgaagttttaaatcccaatatagacaaatgcaattgtgcagttttgcatacttctctagttttggatattaatagtaagtagttcatgttgttacctttccaattgtaatgaggattttggaaatggataacaggctttatcagcagctatctactggttgaaattaca

SEQ ID NO: 14081 - DNA, 957 bp, Aquilegia coerulea
  Intron number 7 from transcript AcoGoldSmith_v1.019953m (l ocus AcoGoldSmith_v1.019953m.g) derived from phytozome v7. 0 (chr-ID scaffold_53; pos 307508 to 308464)
tgccatctacttctcggtgcgattgaatctgtaagtagaaattattcctcaacatgatttttcttaagcttccatgtatccaaatacgtatgtttatttctgtagagttataaaagaatactgataatgcaaaaaggttaagaaaggggaactgatcgatgttaaggacaagtacgtgaatagttaatgatcatgactatattctcctatgaaccagaaaaggctctaaaactgatttagctaaattgtgagatacagtaatagatggcctatcacgtactggcttaacttattctgtgtttttattgaataggttactctgaatcatattcaaatggaaatgtaggagcaaacttattacatttttttctcccattcccattgcgtattttatcggaaggaaaaaaaggtgagcaatgtgtcgatgttcgggaaaggaaaacacattctggatgaatgtcaactaccagagatacattgtgaactacagatatactttcaaagtataagctaaactaattagaaacatttattggcgagtttcatgaatagataacacctaatgaaattgcctttaatagagttacagaacataaccttactatctacatgtatgggcacatctactaaatgtactccttagaaagtagcagagatgaacttgtaaatagtacataacaaagcataagacgtttgtatgtaatactagtaagtcaaattacagtacaacataaaacactcgatagggcagaattatttagcaatcaagaatcaccttcatgatagacagtttccaagtttgtcttcacacaaggatacagaaattaatacatgtcgataataagtgctatgagttatctacatgcaatcttatatagttatactttatgtattaattagtaatatccaaaatctttttcagaaacttcgattccttggggtagaaaaactaattat

SEQ ID NO: 14082 - DNA, 2209 bp, Aquilegia coerulea
  Intron number 1 from transcript AcoGoldSmith_v1.005550m (l ocus AcoGoldSmith_v1.005550m.g) derived from phytozome v7. 0 (chr-ID scaffold_9; pos 1285199 to 1287407 reverse stran d)
ggaaggaagaatcaaaaagtgttgtaccaggtaagtcaatctcaacaaattttgattttcatgaattttgtagatagcattggtgcagagtatgctgaatgtgttttttttatgcttttctgaatgctgctacttttttatccttattggattgcatgttacacttttcttacaaatcctgctctggtagactgctgcattgatgtggtcttactggataaacgataaatgctacaatgagaaactgaaaatttgtaaaatgaatgaactattgatttattaagagcaatatattaaattcaagaaagaatgtattttcctagtgtctgtacagaagtaaacccattgtaatctgtaattgaatgtaagaggtagttcttgtcgcagttgggcaaaaatattcctcttttcgttggggaagacaatgacgaagaagataatgaatggaggtgatgctaatgtcaatgtagatgaccggatcacatctatgtgagagggagctgaaatattgcaatagcaatacacgaggtcatataaagtattattattgcagaatattaggtatctcttagtatttggctaggaacctggatacctacacaatctactatcacggagaagtatggagagtctgtgactagaatttacacattgacagtgtgatgcagtagctctcctgttgtagttacacaaaagcattggatggtaagcatagtgaggaatgaaacgataaatggagctgatatttaaagtaaatatggattactgtcgtattggatcgtgtctaaaggagagtggggtggaaatttaattggtgatccagtgagttcttttaatggttatactgtagtagattagggtatttggtgggaagcctggatagcaatgcgatctactatcatggaaaagtacgggaaagtgtatgcggatttactattgttgatagaacaagtcacttcggtgactagttctatttgtctgttaaagagttattttgatattattatatgcttaataacttgtcagctcctatttatattctgtgtttttcccttgtgttgttattagttttcccttgtatttgtgtctagtcgacaaagtgacttgaaatctttggagtccattctacactgaggtgtactggggaagtgttgcagtcactcaaagtgcagagtaagtgcatagtttgatctgatttataagtatctcaacaaacaccatgttaccatcattctctttcctgtctgtcaccattattttattttcttatatctgcatacttcatgcaaaatgaaattccttacagttgtaactaagacttcctttttcagtcctgcaacttcactgctcctttatgattgagctcgatttcgatttttaatttttgaatctgaaactctttcaataaccagtaatgattgaaactcttgtacaaggaagattgctctcagttgtcaaagtaggataacttttgagtttcttgcagaaaaaagtcctctttgatcttcagtccgtttgtgtcttgatcatttgtaatctattctttagattgaattattctttgacgtccttttcttcacaagggttgttgtaatcttctttggaataatagaagaggtttaaagctgctttatatatagcatctttagcgagtttatgcaatgggcttttaaacccaagaagaaggttagaaacatagaaatagtacagattagaaaggacttcggagaaataacacattacccgtacagtctggcacagtgtaagagattaaatttctttctatctgatagttaaaagcaaattcgaacacatggagaaagaaatcttgctttctcgagataagatgggatcttttggttgtatacttgtatcagatcctaaatatctcgctactatcaattcgcctacaacgttatagattcaaacaaatgatcatcattcctgacctaaggctgtcttgggtttgtggaatatggatcccttaatagagaagaaaagttgatttctctagagtctagacacccccccccccttttctttttttgaatatactgtagatggaaatatgaacgtctttttcttttgaagtttgttgaaggaatgatcttttattcaatctgagttggtaaaatttagaaaagttcatgacgtcattttaatggagattgtttatgctgtgcaggaagtgagatatctttcttcaaga

SEQ ID NO: 14083 - DNA, 1393 bp, Aquilegia coerulea
  Intron number 4 from transcript AcoGoldSmith_v1.004217m (l ocus AcoGoldSmith_v1.004217m.g) derived from phytozome v7. 0 (chr-ID scaffold_22; pos 1060266 to 1061658)
agtcaacgacaaggaggactttcacaactcttcaggtatcacttaaacttgattctgagtgtttttagttgctttattttagttaaataccccttcgttcatttattgcgagtctagttcagttttaaaggtcactaaacgcctaacgggccagtgttttgtgtccctggtctgttatgtattaatccaacacattcactagatgtttaaaaatgtatttgagggcattcatttaggatactttatgataagctgtcttaaaatcatctctctgcaatcatggcattttcagtttagagagtcaaaagaggtttataacttcttaatagcagttttccggtttgtaaggtatgaaatgatttagtgttatttctacctgtctgaaaattgaattcagtatgaatgaacctattagaaatggtcacagatgcaaattatgatagttttgtcccgattgaatataagtagattccgactctagctttccattcaaaaaaaaaactcttaacttgcagttaattatgtcactcatagttattttttaacaatttcatagactggccatttttgaggctgtatagatcattgtctgagcacccatgtaggtttataggcaaattaagattctaactagtgagactaaacttatatttgtatatacacatgagtcaattgctatccatagttgtgtttgtcagatgtgcttcttacaaccatgctcggcttagatgcaaatgtggttccaacttcatgaaattatttgagccaacttactttgcttcggttgttgtcctaagtggctttgtactcatgcacagtgcacccttgcttcccaccgcctttgcatctcaaagtgcaacttctggttttgcggataactagagtgaaccataggaaccttgtccctctattttgtgtaggggatttgcgtttaatttttagacatgtagtgtagtgcattgtatttcaaatgtcaccattagataaatattataaggtggctatctgcttttctaagctttgacctccaaggctccaacacccttctcttgtagacaaacttgacaaatccatataccttaacagagtacttacaaacctgttatattggaaagagaagaatacgctcctctgacatgtttgttcttagtgcataggataatcttgtttaaaatcttaattgctacctatttggtgggccttgtagtgtacaggattctacatatgattgcgttattgttcaaaattttaataatctttcaggtattttaattattacaaactatcagaagttattgtgtcattaaatatgataatatctttcttagatgcaaaagttgtcttcataaattatcatgaattattcctcattttgcagcagtagactacgacc

SEQ ID NO: 14084 - DNA, 2639 bp, Aquilegia coerulea
  Intron number 2 from transcript AcoGoldSmith_v1.006209m (l ocus AcoGoldSmith_v1.006209m.g) derived from phytozome v7. 0 (chr-ID scaffold_20; pos 2585701 to 2588339 reverse stra nd)
cttgaacttggctgtaggtaacttacttcagttaggtaagatttcacatctttgaaattagtattgggcttttaagtactagatgaaatcttcaccaccactgggcctatgtaagatacaattgggcctcataattgggcctcataatcatagacgctctaaggaggcctgtattaggtaacattgtttatagtcatagtatgaaggccttctttagattactgattgtcttgaaatcttgatggtaattcatctggcctaaacgcgacgaaaagagcagtgtcttatcactgttgtcacacactttggatagataagagcagatataaatttagggcgaatttaagattgtccacgggttttaattgctaatttgtgattgttcacgggttttaacaaatttaagattacccactactttcaatttttaggtagtcaaatcaccacggacttggtcaagtcttattttttttactaatttgctcttatctttgtcaatgacatgtaatcatataacaagtttaagatatgattgttttaagattagatatggtcgaatcgaggaaatctaaaggacactatcttttgaccattagactttgtcttctccaaatttcaagcttaaaacaaaaccttaaatcccaaatttgttcacaatttctaaagataagtagggaaactaaactttaatttctaacaaaaaaatattttacctacaaatgagtctagatataatggttagattgaactaatatcgtactatcacaattaatcataagtgttcaattctctctccaacgtgttaatctgacatgggtcaaggagggtattcttggaatattcaataaataaccgggtcaatggtggtttgaccacctaaaagtttaaagtagtgggcattcttaaatttcgttgaaaccaatggggaattgcaattcgccctaaattaaattagaaagatttaattcatcagtaggtggagaaatctgcaataaaaacctacaaatcttatttaagaaaaaaaaattatacaggacatttcgacgtggaggtgtatgtgttacttagattgaacatgcagtgaattaattatgggagatctgagtcacaccacacaaatctcttatgcgccacatttttgaataacttttaaataattatgtttttacgaatttatctctattattctatttggcacaccacacattacattattattatattttattattttgtttttttaaaaaaatttacttgccaaataaaatctaaaacattgttaaattagcaaataaagatatctttattttttgttaaaaatatactaaaatcaactaatctcttcttctttctctaactcttattctcttctaaaacttcattataaatttttttattaaaaagaaatatgaaacgttatgaccttaatgatgagaacaataatcaaaatccaattgatttgaatatttttttatgattccaattgtagatgaaactaaactctcttatttaaaaatattattgttatttagatttattttcatcttctagattctttagatttatttctatatatattttattattaaaaaaataaaatacgtgagagtttttttttttaattttatttgtggtgtgtctaaaaaatcttaaaaatatttgtagtaaactaaacaaatatggtgtatgagagatttgtgtggtgtgactaagatctcccttaattatatcaaatgcttatcagattagagcgatatttaacattaatcatattttcataatactacttaggattgttcaaaaatgcctgtcggccaaaaaagtttgcaagaaataaggtgacgttattatcattgtaacttgataactggcttatcaggtaactcataagtgattcaaaatatctctgacacgcgtgggtgcagatatcaccttatcaagccacatatcacaaagactcagtgactcaccacaactggcaacaagtcaacttcaaagagataacctgtatctgaaaattacacgaaagactgacgtgtaaagctatttgttaagctaaaagataaaaaatttaatttaataacgacaaacaagtaattgtgaactcaatccctatcgaattaccataagtaccccttaatacctaacccagctattttttttgtttcttgacattcaacaattgtacatcgaccagattttttgtagtactaaattacccttctaggtatttttgaacatttatttcatctagatataattttggataaaatttgtatttatttaatcattaagaggtcctgttgtggtaaaagtattatgagggtcgtaatgtaattagaatgaaaacaatgttcctgatgtggtaatcctatgtatttggattcttcatcaatcctatataatgaggtttctctactcctcattttgcacggctattctattacttcttcctatctgtctctatctttagttttctcttcatcatcatcatcatcatgactgtgatcgttcaaggttttcttttattttcttgtgtgtgtgtgtgtttttttttgtttaaatttattttaaagttgatttttgatgatatctgtattgcagaaccaactctttctgttgagggtaacgatcttgag

SEQ ID NO: 14085 - DNA, 2111 bp, Aquilegia coerulea
  Intron number 1 from transcript AcoGoldSmith_v1.013147m (l ocus AcoGoldSmith_v1.013147m.g) derived from phytozome v7. 0 (chr-ID scaffold_74; pos 212124 to 214234)
ggggttcttggattcactatcgtggaacttctaaggtatttcgattcttctagaatctctattagatcttatgatgctggattcatttttaatttataaatcacattgtgcctttgttatgtggaattttagttaggttttgtagtaattgttgctgatattctgttatttctatatgtttatatcgattttatgaatgtttatgagttcagtttggtttgaattgtggcgattggggaggttttgaagttaaggtgtagtgtagggagcttagttagcaattttagtggaaaatgtataaatttgattcgtatatgagacttaaaaggtttgcactgaaattttgagagatggaaatttgtaggaggtgaaaattcagagaattaacgacatttgtaaatactactgtttttaagtgagttattatgtgtattgaggcaaattaaaagtccccacacatgatgcaaagaaatagggagagtactagcagtgcctatccaatcagtgtcggagccaatttgggtgaccaccttgaacttccaagcactcttgtgctcattaagatatatacagggttagagtatttccaatagtgcttttaaactacttgtataacacttttaatagaaaactaaagccaatggtactcttaaacacaattttagagaaaaaacttttaagagattggcaaatttgccgagttaaaagagttttagaggtgccacataagattgtttaataattaaaaattaaattgcattaaatgattgtcgcatttgtgttatttttatctttcattcaaaaacaaccattggcaactctaaaagtaaaaaacacttttagcatagtttaatcctaaaacctttaccctctctcctagtggaattgttttgtatccccactcgtttccttcaattcctcttcggtttctctagggacaagggagaaagtagtgatgggctatcaaccgtacatgattttatgatgtctgttttcatctagcaatatatctgtgacttcttaataaatttattaaaaagaaaaaaaggaaaacatctccccactaattatcataatgtagatgactgtgaccatacaaaaatatttggtctttttttttttttggaaaactcaaagcacacatccgtcaaagatagacgtagaatgatgacatctaagaaatctgaattagtattaatgttgttattttatttaaagagtaatatgcattggacacattgttgaaatttatcttcatgtcaaacatcaattaatctaaatttgagtaaagccaccaaaatgtttacagtttagactccaattgtgtctgaatgtcactacgttaacgatatggactcagttaagtccttcttttgattggtgtaacatagcattggattacatttgcaatagttttgaccacttctgaaaaatttatagtcttagactgaacttgactcacaaaattttgacgagatgacgaggttttcatacttatatagttttctgggcatattgtactagcctatagtatgtgttcagcaaatttttgtgaccaactgttggtttgcctcttcttaaagagcatccatgcaccgcctttgtttccagatgctaaaccttggatcttggatgtggggctaatatcctagaggaaggccttttgctaggattttttggttgagtaggattgttaggatttggagattatgtggcggctaaattctgtttcaacatcgccttcataaatcctttttaatcttgtgatgtttcattggactcatagcaaattgatttttcatttagtaaatattaatatgattagcttagatggatttcaaatgcacttgtctggcacatattatttgatcctgtcaaatatctaggtggatgttccaaatgccacaacagggccttttcaccttttgtgtccaagctatgtcaaataaccatttgatatactatttatgcctggatgttgcattaatgtgcagatcaacataattttaatcctttttggtttcacttttcctgcttttttagtatagccatttcaaatcactcggttatgacatttgttttcttctgattttttgtatcttattaccagg

SEQ ID NO: 14086 - DNA, 2896 bp, Aquilegia coerulea
  Intron number 1 from transcript AcoGoldSmith_v1.007549m (l ocus AcoGoldSmith_v1.007549m.g) derived from phytozome v7. 0 (chr-ID scaffold_49; pos 614702 to 617597)
gtgaaacaacatcttcgtaatccatcattcatcaggtatgtggtttatgatttattgcttaattcttcgacatttgtagagaaatttgtgtatgatttattgcttagatcttgtagagaaattctcacactgttacacaaatttctctttcctattcgtttgaacttggaaccaaaaggtcgtccagaattgcaatcgaagagcacacggttccattaatatgcttcattctgttgatatgagactatgagcaaccggcaaaaaatcggataaagagtaaatgttaactcggattattttataatcggttctaaaatcgtttaaatcggacttcccaaattaatcgataaacttggcggtcaaaactagtataaggtctagaagttagaattttttttttaaaatttaaacaaatttagtctaattttgataataattgaaaagaaattagttgaatttgatggtttaaagatcaaagattaatgaatcaatttaaaccatctccaattatcttgacattctgaagaaaaagaaagaatacatgaaaaaagaaattgacatagtaaagaattcaagcttgtataatattagagagaacagagaaattgatagattgttgttgagagccatgctgtcaacgctctggtcagatcggcccatacaaacgcgctcaggcagcccaaacctaaaaaagcccatataaaagttaaactaaaagaaaaaaaaatctcacgttctctggtctctctctgcgtctctgctactgtaagttctaaattctaatcttctaagtttcttctaatcttcctaaatcaaatccaaatctaatcaaattcaaatcttttttatttaaatttttttaatttttcaaatcaaattcaaatctttttttttttcaatttaacttcaattgaagtattaagtgttaattgttcacatttgaatatattcaaaaatctggaattagtagagtacactgttagtaaacagtgtttactgtatagaaaatattaagggaaagaaatactattagtgtaaagtgtaaactgtggggtctgatcggagtgccgcctgagcggtggaggcggttcacagaaatctgagcgtctggcgctccgctccgcccttgacagcataggttgagagactttggagacgatgaagatgagatacaggtcaattttggtattaattggaagttatataatggtcctacaagtttaatttacatgagagtattagctattttccaaaatatggcagttattactttgacaaagagtctgacggttttgattggaatcgttaatttgactcgggatcagcccacgcagattctactaaaaaaagggttggtaaaaaccatcagtagagtacataatttgcgaaaaaataagttcttaccaaaagcatgcaactctacttttttctttgtgtgttagtcatagatatattgattcgatctcagcataagaaatctaaaatatatgtacaaaaatcaagacttcaagagactaagtcgttatagggaaattcgcacaagggatgaagccggttactaatttatatggatcataattcattaaaaccttagagctgcccaatggtaggttttaaatcccttttagacacttttagtgaaaaactcttgccaatagtaacttttaacacacttttcaagcaaaacacttttaactccttgacaaatttgccaagaacttaaaagtgccacctaagatcttttaactaattaaaaattaaatttactcataatgtacaccatgttttttttggaaaaataaaatcttaagttttaacaattattttaaaaccaaccattggtaactctaaaaccactaatcacttttaacattatttttatgctaaaaccttccttctctctcctatgtggcacccctaaaacccttttaccattgggaatgctcgtatgtgtggaacctgtgggactaacaaaacactatcacgtgtaggtgcagtgaaccttagtgggatttaaataagtaactcaaccaattttatatacacatgacaattttttattgttcccataggtcccatatataaaaattacaacatataatttttttttttgcacaattcataagcattcccaatggtaggttttaaatcccttttagaaacttttagtgaatatttttttgccaatggtagcttttaactctcttttcaagcaaaacacttttaactccttggcaaatttgtcaaagagttaaaagtgctaagagcattctcaatggtaaaatggttttagaggtgccacgtaggagagagggtaaaggttttaggattaaactatgctaaaagtgttttttacttttagagttgtcaatggttgtttttaaatgaaagataaaagtaacacaaatgtgacaatcatttaatgcaatataatttttaattattaaacaatcttatgtggcacctctaaaactcttttaactccttggcaaatttgccaaggagttaaaagtgttttgcttgaaaagtgtgttaaaagctactattggcaagtgttttcactaaaagcttactaaaagtgtgctaaaacctaccattgggaatgctctaagtaggatcttataactaattaaaaattaatcacaatgtacagttgtacaccatgctttttgggaaaagtaaaaccttaagttttaacacttaatttaaatcccacaagggttcattggtataggtcccacaggaataaagcataactaataattttttattttttattttaaaaaaatgttatattatcattaatcacaacacataaaattctttggttactaacctactatatttccttttctttttaggtcatagcaatcattgtagaaaagtcaagagttca

SEQ ID NO: 14087 - DNA, 3843 bp, Aquilegia coerulea
  Intron number 14 from transcript AcoGoldSmith_v1.001653m ( locus AcoGoldSmith_v1.001653m.g) derived from phytozome v7 .0 (chr-ID scaffold_13; pos 5288099 to 5291941)
actacaacattaaggtggttaacttgttttttcctcgcttaggttactacgttgtcttgagttccaatttcttttatttatgcatgtaagcatcgtcttgtgtgtaggttctgcagtatcagtttctctgttcataatatgtgtggtttcaattcactataatgcagattgagtatgaggaaagagttatgtggaatcggttgcatgagtatattgattccttttaactcattattttttttcttttgcaactcaccggcaaaaaacgctaaacatattttacaagcactaataactttaagggcaaattaatttggtcctgctttggtttttagtccaggaattttttagtgattttacttcaatatccagacaatacaaaccttaagggtgtattgaccatctctccaacatcaaatgttttgccttttcttttatataataaaatttgtctgtggatatctaatatcgtgtttatttactgttttatttccaaagtgctgtacgcctctaacataatcttgacttatataaatagtatataatattgtctctagtagtttactattttgaagcagtgtgtttgttaatatacacttaggacttcttcaatataggcacacaataaatttctagtagattttaaactagtacgataatcttgccacctttggaaaggaatcaaaatttgaaaatttcaagcttattggtaacctcttagtgtaggtactaaatttcaaatgcctttgttgtagtagtctgttcatgcatgtaggactacgtgtatgcctgttgcaaattggcgcacttttggaggataaatcaaaattcttttctggatgaaatgccatacattaagattgagtgatgtgaaaaacacataaaacggcatcgagttccggatatgcgtaatcatagggtttggggtggggatttaaattaagctgccactaaatgacacagtgtgcaaattaactttctgtagatgccaaataaaatgtagagaaaagaaacacaccgtggagtcgtggaggagagtgaaattgtgtatatgaagcaaagtgagagcgacttttggcatgagtaaacagagattgccatttctgttcaatgaggggcagagaaattgctattttttcagcttttttaattttaaaatgccccacatgccattttttgattagattgctaaaggaaacatactttttattccaagcacaaggtgtgctgtaggcatgcttacatgtaaatatgtgccagggaacaagacttcccgaagcctataggtgtgtacagagtgacatgaagtgtgctgaaagtcattttcatcgttaactttatcaagtttctgtatgcaccagaaaaaccaaaatctcatattctttgaattgagaacgtcaaaaaatgaattttttttttaggaaaactaccaactgactgagactgaatgatagaaggaggtttacaaagataggcatcggcaaatgcacaagatgcatgcgttgaatgcatgtctgaaagggtaacacatataaataatgtggaaaacaatctgcctgtgtagtgagagatcagatatataatgtacagaaggaggagattattttttatgctttttagggattgttagctagtttatcattgggaacctgagatcattataaaaaccaacaggatgagcaaacaaatctttcaaaaagtattatcatctgagtaagtaatatttaatagacgaaaaaagaaaatgaagggttgatttctcttactatatataggggtgttgtatgcaatacgcgaatattgtatgtgactttcatgcacaactcaataggacatgcatgataatgaatctaagactgattgtttgtcgatagatttcttccccatgaaaactatgcttaccaacttttggtaggttatgagtgataatatctcatttagtatttaatttgtcgaattataattaagcggtgggacctgctatttgcattcgaaatgaaagatataacatatattaaatggtgcttttttggtaaataaaagacatccgtgatgttacctcaaaaagaattaagtagtgtccctagctagaaactaactcactatataccttgaccctgacctcatataaattttcacaaattacttccttaatgcttaccacctacccaccaacccaattactgtgtccactcctcctactctccttatatttcgatgtcatcttcattctcgtcctctttacgtatgttgttgaaagttattgtttcatcttagtctagatacttgtcatttacaaaatggagtttgttatagaaaaagataatcattttgttggagatgcttaagagtagaaaagcttgtgattagttttatctgaaaaaccttggaaaggcaatatattagttatttttagagtgcgatttaataggaaattatgacaaaagaggaagggggaagttcattattttctcgtgatttgttttgataggaaacttcacaaatcgtcagttgtcacaaggagccaattcttaatcaaattatgaatgtatttgtttgtagatctctacttggaaaactgtagagacggcaagtagacacgttcgttaactaggaatgagaaactgagcatcagcatatagatatactgtattagcatgcttctttaatattctgtttgatttcatgatttaataactgtatcaagatggcactcatcgtgctaatcttgtactgatatccataaagtattagtggaagattgattgtgtcactctcagtaggaatagatttggtttcttgttttttagttattgttatttaatgagtttgatagtttccttctgggtggtactaagaagaaaatagaacaaatttgagaaggctaaaacgatattatcagtagaccatagtcgataaaaatggtgtgttgaggtagcacttgctgaatctttcagatgaaaataataatcaacaccaagttccaaaaacatcaaagtatattctggtcttcgaagcacaggcagctccagccaaaacatgcgagagacatgtagacatatgttgtctggtaataatagcatcattctctcacataacaaaagggaagccaactttagcgcagactgctgtgctagaaggggggtgctctacaagagaatgaaactagactgtggcctggaagaccaccctttagtatgatattagaaaattgttttgttacatattacagatttgtaaactgagtttgtaaatggcagctctgagctgaccataccatgaaactgccctgggcattaacttcggtaacattctttatttaaaaaaaaaagaaattacccttggcaaaaaataaaaacaaacaaaactgttgtctagccttgcttatcacgatcggaagaactttcaaaagagcgttgccaatgagaaaagaggatcagagcattagtgatttctagtgatttcttgtattcttacatgtgtgtgtgtgtgcttggagagtttggtttcaaactttgtttacttcgcaagtctcaatcctttagtcttaaacattttcttaggtgctgtgtaagaagtgaagaacctagttcagattttcactcatgacaggatattttatttgaggcataagatgcttcgcttcgagcgactgcatttggcaggtgacatgtataggtcttgtcttcatactctacacattatcatggaaattcttttgcgaattaattactttaaagggtgatgttttaattttaatttttccccatctagattacagttatatgaattacaaatttgattgcagttagttttagagggggcgaaggcaagacagctgca

SEQ ID NO: 14088 - DNA, 1091 bp, Aquilegia coerulea
  Intron number 1 from transcript AcoGoldSmith_v1.015964m (l ocus AcoGoldSmith_v1.015964m.g) derived from phytozome v7. 0 (chr-ID scaffold_45; pos 1465923 to 1467013)
gaagattacgaggtgcctgtttgatttgaaattttacagtattgaaattgtttgagttttcaattagatttaaagtttcattatcatagttgagatttatatatgtgaaatttttcatttcttttatatatctaattggggattgtaattagaattcatatttaatgattaataagttgcgaaattttgtttcaaagtcctcaagagtttattacaaactacgaaaacatgatagctaccagtaattaaaggaaaaataactaggctctaatcaattctatgcaagagattgatgccctatatatgatatgatatgataatattgcaaacgctgtgggtggaaatctcaattacagtaagaatttacatatgatatcaggatatataatcttaacttatgtactgattttgggtggttgaggaattaatactcgtaataaagtttgtaatatacttaaacacatctcgttatagatgactgatatctacttatctagcaacaccactaacctcgtgatctgaactgccaacgcaatttcgttatgcaatttccagtatcttgatgaaatggttgtatgtaggtttttagtttttctgttttttttttcttttgaattacagtctgattttattacttttgttctggttatgttccagttgtacacattggtaaaatggacagtatgccaagagtcaattgcagttgaataatattctgaaaaattgatatctctagcaaaatggatatttcataatatttgctcatcttctatttcattcagaaaaaaattctgtggtatttcaattatgtacttcaccctctttttttttctttagtacttttcaatgttgttttcagattgtatttttatacgaacgcagtaagtctatctaattatctgggcttcccttttattatggtggaaaagttgggtctttatggagcttacgatgaaatctcgtgacattttttctcttccgtttgaacaaatgtctcaacctggtgttagactttgttgtatgtgttgtcctacaactcctatctgattaaagaagcttaaacgaaaattgcagattgaagaaaaaaagca

SEQ ID NO: 14089 - DNA, 1358 bp, Aquilegia coerulea
  Intron number 1 from transcript AcoGoldSmith_v1.011876m (l ocus AcoGoldSmith_v1.011876m.g) derived from phytozome v7. 0 (chr-ID scaffold_36; pos 317688 to 319045 reverse strand )
attgcttattcatcttaatcaatcttttctcttaggtttgttttctttaattcattttcaattttctcttgctttagtatgatttgatgattaatttgttttagttagtagctaaatgcaataccttacagtttagggtttagggttatcattttggggttttaaggtttgggtttagggtttaatttagttttatatatagtcagaaaataaataaatcatgtgtgtgcaatgggtgaggctatgaaactcttgtgacaattttgaggaacggaattattcatttgctagacttgacaattatataacatattggacagaactagagatcagaaaaacaatctcctcgaaaagattcttacctcgactttataaatcatccacattaacaagaattaataaaatgaggtgaactttatgaatcttgtgtatccagattctagggcaaagttaaacattttttttcttctctgcaaatcaactaatcaagtgtgcaaacttccaattaatcttcaatttctcaaagagatcaaactctgtcaactctttttacaggttagttcttttttgttttttttctactactgatgcataaattgggaagaatagcatttttggttgaatgtgatttgtattattcacaatgaaaactaccaattataagtaatttgactagtttcgtatatgtttgtggaaattatgtttgcggtttttcattgattttttatactattttgcaatgtgaatggaattttgaggtaaattttttttcttttttcaatcactcaaccaaacgattaacctaaattatttgctctggtagatcgagaagtcgtatgtacttatatatcgtttaggacatggttgatttatggatttttggattgactgataggtctatattactagaatgtttgtagctaagtttatgtttggtaaatggtgcttgtcttcctatgactttcctgtttttgagtaacttaagttttcttaattcttgttaatgtggatgtaatgggtatcttcttataaaaaaaaatgtctttgtgtgcttaggattccaatgatttggatgatttgtaaagtctaggtaagaatctctttgaagagattttttttccgatctctggttctgtctaatatgcagtataattatcaagcctcgcgagtgaataattttgttcctcaaaattgtcacaggaatttcatagcctcacccgttgtggcacttgataacatcttattatacatctggaaaaaaaaattgcacttggattttttgagatagatatacattgttctacatgttttaatcaagtattttgtttgattcattgatcaggttaactcattcacaa

SEQ ID NO: 14090 - DNA, 940 bp, Aquilegia coerulea
  Intron number 2 from transcript AcoGoldSmith_v1.009394m (l ocus AcoGoldSmith_v1.009394m.g) derived from phytozome v7. 0 (chr-ID scaffold_9; pos 1583561 to 1584500 reverse stran d)
acaggtaatctttttacaattaattaatcataataatcattaccaacaaattacagtaatatgatgtagtagactgtagacgttatcaatttcacacatcaagagtaatgcattttaatatttttaagaaaaattatatactttgaagtaatgcatttgtaacttatacacaattaaagaatttgaagaggcgtgagctaacttgatggtatatcatggtttttgtgcaattgtttgaagttattgtgaaatgcacttcttgttgaatgtatactatatatgataacaaaagtaactatgcagtttgaaactttgcaaccgatacacaaacaactcaacacgttgttttgttcatctgaagaattttgtatgtttgagttagtagataaagtgcagagaatatttgtaataataataataataaaaaaaaaaagatgcttttatactttacaaaaagatttagacatgcatatttcaatgtagttgtctattatgtattcattctaataagaagtgctacaccggtaacattgcattcatgagcgacagtcttgtccagaagcctttattcagcatctggttagtccatccctcttgaaattctttgtatgtttatgtgttacaaagacatctacgcatgagatggcttctcaacaaattcattcttgatgtgtcaaattgaaagacaaattttctgccacattgtaccttttcgatagttgtcaacattactgactcttgatctgtggttacaattggtcgtgtctacaaatcatttcaccttgactccctatgccagtttccataatttaattggtcatgtgccgttttaccaggatcaagcgacagatcttttaaaatgattcctatacactattagctcttgacctactcttttttatggtttctttgtaatttcatgcaagggtagagctcttta

SEQ ID NO: 14091 - DNA, 2743 bp, Aquilegia coerulea
  Intron number 10 from transcript AcoGoldSmith_v1.001126m ( locus AcoGoldSmith_v1.001126m.g) derived from phytozome v7 .0 (chr-ID scaffold_6; pos 7309651 to 7312393 reverse stra nd)
aggcttttgccaaattgagcaacgctattgggaaggtgaagtaactactcaacaattttgttcgatgctatttatatttgtgttatttctgtagtgccgatttccatatcggctccattgcttaacacagtttctggaatataaaattatgacatagcaagtgtgagacaacaaatgaagattggaaattaaatagaatttctggaattttacgtaattacgacttctctgtgatgtaaatgtatttctatggacatgtgcccacttatatagtttaaattttaatagtcttgagtctacaatatgaatctcacattctcacccacgaccaattggattatgattcacttaaatcttacaagtacgttcaaaattcaaattgcttgaatcttacaatttaaattttaaattgaatattcctatttaactaaatgcattcaaaccattttgcaagtctaattctcccgttctgtggtccacaatcccaggtttatctttgggactgatagacattcggagttatgtataccaaacagaatcatatatctactatattgatgaatatctctaaaaggtcatgtattttaaaattgaaagaccatacactcgatgtaaaagaacattatttttgtagcttggatctatagacgccaatattatttttacatggttaagatggtatgtgtttgccaagttccaaacacactaaagaaaaatgtatttgcattctcatgcccatttaaaacatacctcataacagtttcgtggtagatacatagatcgagtgggcaatgagatgaagataaattatggaagtagtggtcctattcagagtggacttgtggataagttcaaaactatattctgtggacttaatatcattttgaaagagttgaatataacagcattttgtttcttttctagttttctatgtatatattaaaaaaaaatttgatcttattattctttgatttggccttcactatttgtgatatggttcataattgacaacatcacatcattaattagtctttattcaatagtaatagttgttcctttggttggagatggcaatcctcaggattatgaatttacatgaaagactagacgggcagtgatcaaattaaacaatgaaccttctttgttttaattctccagaatttgcttttataatttctttttgttcgaaagtagaacaattattttaaatagctgagaaacattgtaattgttttctttttgaatgtatattttaatttcttatgccaacaaattttgtctagtagtcatttcttcgaatggagggccaatataatatttttttattgagacgatttcattatataattaccaatcatcgtaaaaagacacttcagatgattgtattacttgattttccttagtgccttgttaagggattttttttcttatgtaatgtttacctgaatgtaatttatactttataattttttttatgtttaattatgaaaatcatgctgcaaatccaggccacattttacgaattttaactcaaccatatgtgatgttcaagttaatggttaaattaggctattcacgttgtttttgattttttattttacataatcctaagaaaagagagtatattcaaactttgcgaaaggatatctgagatatccctgggtaatatattttacataatcctaagaaaagagagtatatacaaactttgcgaaaggttatctgagatatccctgggtaatagaatggccaacaaaagtaaatacaagaaatgcacaactacaaaggttatttaaggttccataatgagatcctttcatgataaaacgatcatgtcaaaaggtgtgtgtatatatatactcctgccaccgcttgttgaggcaaagtaagccgttgatgtcaagaatcgtatttgatttgttcctagttgtgttctgaaattgtctccgatttcacccaagtcatagtatcgtgaaagcaatggtgctccacaatttccaaaggaagaaaggttgaggtaaaaagggggaacattagaggatgttacaagatgaacaagatagtaggacttcaccgagaacatgccttttgctcaacagcctgatacttgctgtgagcaagtatgggagtggtacctatccttcaagcaatcaagcatggttacaaatctccaagctgttgagaacttgtctctcatcactaaacgaagaagcataaagaagttctgtcgaagtaatctttacagtgaagtttttacgactagacatggtattaaaactgtggaagtccctacaaaaggcatcttcacagaccaagaactgcaagatcaccccagaatgaaaggggtgacggtgggatcgtaccattcgagccttttttttcatgctttccccggaggtctggagaatgctgcaatctatctccaatccacatgctttccctgtctctccctttcctaacaccacacccatagggaatcgagactggacgactctcctaacccaaaggagtgtccatgccttgaaacgaagacccgccttcacaaactatcctgtttgctgccaaatcttcacagccatttggaaagcaatgcattgattatagtcctggcattcttcagacccaggaccttgtgtgtgtatatatatatagctagctttttattattagcatcaggctttttgtaagcacttgtaagtttaatgttaaatttctgtaacaggtcattgaggcacaggtggac

SEQ ID NO: 14092 - DNA, 3985 bp, Aquilegia coerulea
  Intron number 3 from transcript AcoGoldSmith_v1.000367m (l ocus AcoGoldSmith_v1.000367m.g) derived from phytozome v7. 0 (chr-ID scaffold_23; pos 2942712 to 2946696)
gcttgacaaggagaccttagacaacagctttcgaggtatttcaacttgtacacttgaatccttgatgcttagaatttatttatttttattttatttttttccgtatattacacaatctttatgagtactttacaattttgtgttcttgtttgtacatcgtaattgctttcccaatcataagaaggttattttagcagattgattgccatccttgatccttgactgtaatcaagttacagatgatgaatatagatgcttatgagagttatgacatcatatatatttatgcttcttgttgttgttattattacaaagttttcctttccataattgtttttgtgggaatttctcactattggatggttaaattatttgaaagagttgacactcaagtctaaggactatgacagggagatcttctttctcctttcgtttttaatgttcatggaagctctcttccggatggttccagaatgtctctggcagatttcaattgatcaattaattgatctagaagctggactcttcgtttgaagtagttttatgtcggaaatcaacttggcaaagacttctgttataggtattggtgttgtagaatcattgataatatagagtggcttgaaagtatgatggggtacacggtgtgtcaatttccttgtcgatattgtggccttcctctgggagtggacatcaagaataagctagttttggataacggtggcaatttactctagttaaaagcacacttgtatctgttccagtttatcaactttcacttcttagttcatactgtaccagaaagtgtggcgaagaaactgggaaaagctcatgggggacttcttctggggatcttcagaacagagcaaaaaatataagttgattgcaggggaacttgtttttataccgaagagtttgggaatactcaatgttaagaattcgataacaaataaagccctcctcggcaaatgggtgtggaggtatggtatggggaaagtagggctaaaaatatattgttgaggctaaatatgaaaatccagataggagccgatgcatactagtacgatgatctacggttgtagtatgtggcggggaatataagcacggagggacattttgaaacctcttgttgctcgtttggttggtagatgtgacaatgtgaagttctaattagggtgtcaattttttatttctagtgctacaggtgtgtggaattctgatagacctttgcgagaggtgatcaccaatctgttttggatttccgatagtaaagaggggttggttggtgagcatttggtgttggcgtggtcggttgggatattaaattaaggcatggccttagagactggcatatgagtggagtataccggctgatagaacttctggagacagttagttatgttgattaagaggataagttgaagtggaagcatacaaagaatgggaatttttcagcaaggtcattgtataattttttgttcactccaaggagtcaaggacccaaccccaacctcagatatcagcccctcacggattttgaaactgtccatcctggggtaaaggaatacctccttgagtttagttcttcatttctgcaaggaaaagtattgacaaaggaaccactaattacggacgacaaagacatttctcccatttgtttattgtgcaatgttgtggtggaatcagatacatctcctcttccattgtcattttagtaaagcaggttgggattacttactagttactagccaaacaggcgacacaccgctcaattacctcgcttgaaaagttgcgtgagcaaactactgcgactaggctggagatttgcattgtggtgggtgatgtatagacaagcaatgaaacaaactttcaggataaggcagctgtggacagaaggacttattatacttttgatgtgctcaatgtaaactggggaaaggtagtcttgggtgtaacttatgtagttcctgggtgggtaatgggtttgtgcagtggcggagccacgtggggttgagggttagcacttgcggaccctcaacttttcaaaaatagtatgtaagaactatgcatagtgcgtagaaaaaaacattagttcaccttttttctctttttctttctgagtttactaatttatccttgataatcaacattcttggttctttttagttaatgttggtaaggtccaaatagtcattttatatttttggtcacttcattagtataaaaagtggttaattatatggaaatcagatccacgtataaatattggtttataaagggacccacttcaatccaatatgctatatcatacccatcatcaatttgatgtccagtggttcgtcaatcgccactaatattttgtgtaatgaaattggttttaatttttcacttgttaaattattaatttcttttatgtttttctggttattttgtatactgcaaagtttcgcaaaatattgatttagggtactccactgctccccctcaccaaaaatcctggctacgccattgggtttgtggaggtcttatgtaagacctttcccctccctttgctttgtaattcctttatattttctaataaataagatggtaatttaccaaagaaaaagtcgaagaatgcaactcagttgatcttaacttaattattcaaagacctttttaagattgagctatttttgtgtccccagttgttcttacatttcaaagaagcccatacattcaaatgtttaaagtaaaatgaaatctccacccttaggatatatgtgattcatgaaaaatcaatttcgcagaatgtgtaagggtagaattcgaatttgggtttaggtattatcttcttcggttgtacatatatttcttctatattccatgcatcatcttcagtctcttccctctatccacttttttggggagttgattgagcacaaatcaaccatacccttaatgattgttgtgaacaggttgcatgatgtcacgatggaattcctttaaacgaatctctgatgataagcataaatatcaacttgtcaattgaaaagagtttgcttttagcacatcagagccaaaaaagaatattggctgtgtttggttcacagcaaaacgaggaaaatggagaaaaacaagtatcgggttacttaaaagtgaaagaagagaaaaagaggtatgtaacgggccgaaacaagtgagaaagagaatagaagatgcgtaaaaacagaatactccataaaattaggtgtgaaataaggaaagctgaacgaaatctcttttcctccatcttctaccccttcgtgacaccgcttctctgtatctcaccgaagttcagttatattttcattttccgtcactttccctcgttttccagtgaatcaaacacagccattgtgaaagtttaggactgaataagacagcctttggggacaggcgattgattatctttaggactactttcaataaatgatatcttcaggatgctgcctgtcacaaactccccacaaaagaaatccacagtaatctacatactaaatatggctggaatggaatcatcaacactttcagagtctagtttgtgaaatagaccatactattctggacatcgagggatacttcacgtttggtgttagagatggctggatttcagaggcattccggtcgcggcatttgtgttctcccgggagtcagttccattggagagttggtgatgttggtctccccgtggttatcttaggctttgtatatagttgtttgcttattttgtagcttgtatcgctttgacaagggatatcccatcgcttgggcctactgcactttgcttatgtacattagtccatttatgaaaaaatgattgtttacttctcaagcagaaaacaatattttttaattttgaacttttgttggaaacctattggttgtgaatgactgctgctatggtccagtttgatagctatttatttattttattattgttaattttgtttttcttgcagaaaagttg

SEQ ID NO: 14093 - DNA, 2996 bp, Aquilegia coerulea
  Intron number 1 from transcript AcoGoldSmith_v1.005500m (l ocus AcoGoldSmith_v1.005500m.g) derived from phytozome v7. 0 (chr-ID scaffold_9; pos 5440476 to 5443471)
cacaagtcatctgactcataggtgtgcaattctataagcgttgtttgctctttttgggttactttagtctttgtttcatgttattgttgcctaaatgtgttattttcagtatcctatgaggaattatttattggtttacacttgtgttatctaaaaattgttaattatctttatgttttggttataataagctgtttatgctctattattatatgatgctgttgtatgtttgaaagattagctgcttgtgcttatctattctcgtagacgtttaccatatgccaaatcttcacttgatgggctctgtctcattttagtacttttgatgtttaattttacggtattaattatctgcatgttttgtgcttttctatactggtcataaatttatttttggagaaaaaatttagtgtcaatgcatttctattactacttagattataatttctcgttctggtgtactctatatgtatggtctttgtcactttgcatttctcttaattccatggctttgagtttctgcgtttggatgtcttaatcttttatattgaaaggttgcattgttgttcttttgtatatgtagttgagttatgtggctttgagttttgtctttgaatgtcataatctttgagttgaaatggttgcattgttgtttgttgtatatgtagcaaagttgcaatatgatctatttttatgattcataattttgatatctcaaagtatagtttccctgtagacaaattctgaaaaagtctgtgtagttggtttctcttatagttgttcaaaaccgccttactatgtattaaactgcaaaggaattcatttatcaacgtcaataaaacctgaatttagtaaataatgttgatgttagaagcactcaattctgctaagctttggcccttaggttactaaattctggatccaaccacaattttcaacaaattttatacaaaccttgattttcctaaaaggatgaaattatctaacttgcttcaaattttaaccttacagttaaagacaaagcgatgataagttgacactttatcaattgattgagtttcagtgaagtttaatgatgatgttgaactttaggtcttcaatgcatgataggcatttaacaatctagttgtaaattatttttttggaattataaaatgtaagtattcaactctgaaatgtcaagaggaatatatggatcctgtgtttccttttattctgctgtaattttacagaataaatactctgtcttctcatggggtctctaatagatggccaataagcggtaaactgtatgttgtcagccattaggacatgtaaatagtttcgaagatacactattacacttacgacatggtcatagcagggaatataagttccaatgcaattagtaagctacgtcaggttgaggttgtgtcagagcttcataaatttcccttttcttttactttaggcttgtttatatttccaggactatttttttattaatcacttacactctgaaaatttgttcaattgctggaatagtttggttggaaataaagtctattactactttagttgttcaaattccgattttgctgaaaataaatattcatagatgaaaataaacacacttgatatctgtcggatgtggtcttactctgatatcattacaaagggtaagttattgagctatacttttacatttgcatcaaatatattatatttttgttttttcctgtttttgtggttatattgatatttgggataagtcatcttctaccttgaatacaaaattatcaacaacgatattttgaaaactgattagaacattcttgattttgatatcgaattgcttgatgtggatcttaatggtgatactgcatggatgcacatagtgtagacattgattttgtgatagagatgcttttgtgacgtttattattacgtgatcaaatatcatccttttaaacattattttgttctctcttttatgtgtgactgcaaatatattgaagatcatcttcaaaaatatattatcttgaatcttctaaatagggcccttggtgcctcagatttgatgaaacggatttcttgggttttccatgtatttttgcaaaagttttgaacatatataatgtctgtcactccacagattcacatatcctgtttccagattattaatatcagcgttaagagggtctgagtcaaatagaattgctgattatttggcacgtcttgaggaagaagagggtgtgagttactttactgcacctttttgtaggcatattagtattggggtctgctaaaccttataatccgttaaatgaaaatatattagcctaacaagaaacaattgtagggttttaattaggtagtcagataaagtggtgagttatttttataaaatagcttttgaagctagcatgaagtcatagcttgttggtttaaggaatatccaattccatctccttttactcttgattgagtatttgtttggcctaagaaattaaactagtgtaattttgattgattatcatatgcttccaaaagatttctgagtaccaatgtcgaagtatataagagttgacattagcacaaggttttggttagactgttttaaagaagggttgggattgggggtcagaattgcagactgtcatgattgctgtcgaataagatttatgcagtgagtccagatggttcaagttttgggatgtgcttgagtcatctaatctttatgtactttgattaagtaattggattttagttggattgctacttgtgtttgtgtctgttagtaatgtaaactatgcggggattttcacatatctatatctcatttgctggttgagtcatatccttctgcacttcatatattattgctcgagttatgctcttctgcactcttatattttgctggttgaacattacgtgctttcttgtatgcataagtaaaattcttttccaagtaagttagagctacatgcttttttttatgcagtctgagatcgtta

SEQ ID NO: 14094 - DNA, 3984 bp, Aquilegia coerulea
  Intron number 2 from transcript AcoGoldSmith_v1.010679m (l ocus AcoGoldSmith_v1.010679m.g) derived from phytozome v7. 0 (chr-ID scaffold_12; pos 3672373 to 3676356)
ttcagcgatctccagaattcatcgcattgttgaaggttcatatctatttttattctttttggctgcaaaacctttatcttaaatcaaaaaattgattatttgtgttgtgttgatggtttttattgtctatattttactatgttaccaacattataaaagtggaacataaatactcttctggtaaacaaactctttagtgtgttctcttaagtttattacgtgatgtcgatatactactactaaacaagtagtattgctactccattaacttctttttttagaggttaacgagcttcagtaaaagagttgttaagggatgtggtatttgtggtaaaaaacacagctaaagacataacaagacaacaaaaaagcaaatacaaagctacaacatcacacaatactaattgatggaaattaacatatgaattagagtatattttattttaagaatcttatgttttaggaataatttgctttgatttgtttgtgaagacaactattttctgtaatttagaatgtcgttgttaacaaccaatctttcaaaacctaacttacacttctattcacagattagtatagtgatagtaagggaatcaatccacctcgaagttaccaacagattaatatggaagaattaaaaacaatctatctagagaataatgggataaaatttgaatatacgaatactaaactactatgcaaaacatgcaaattaaactaatgcaaaaattaatagatttactaatatgcaatgaagaatctcaaggaaaatgaatccactattgtattaagaacaattctttactcttgtttcaacatgttaactaactaattactaattagattttttttttctaagagacaatgtaaatatttagctttgaacacacatgttgattatcaatcattgattactcatttataatatcttctatcacaaaaaatgtaagactttgtgataattttatgtatcccattgaggtgattacaaatatatcccgaaatctatagcaagaagctagaaactagaaaaatatgtgaaaatactgttttatttagattttcacaaccataatcattacctttcaccttcccatctcatgttggtgacaatagatcataaaccccacaatcaatgaaatgaaacataaacaagactaattgcagagaatcataattaaaaacaatggcttcatcatttctcttgagagaagatgattagcctaacgacatactagaatcgtcaatcaaaatatttaattaaaacataacgattattgaaaaatgataaaatattgattaaaccttctgtttcagcctccaagggtttgaaatgtcaaaaaccaaagataaattcatggctatcacttatggtatttatatccctcctcgtaatgtctagatataaccagaatatatgtatctgtgaatgagcctttggctcaatcgtagaacccctctcacatagtggagaggttgtgggtttgaaacacgtcagcagttagttgttgatataagtttccttacgtaatatttaaaggggtaggggtcccctcaaccccgattgccaatgaaaaaaaaaaaagaatatatgtatctagggttcgaaatagtcaaaatagctttgggcataataatcaaattgttctaagcttttgttgatatttccacgttggatttatgccttcagaagcttcaaccaaattaaatcccagttagtcaactttacagtgttgttggcactccttagcaactaatcagtgttggcagcacttatctgagcacgggccaccacaggctaattacgccaaacctgtagggagaaaatgaagttgtggccccgatttgtatatgggcgtgaggggccaatcagataatgccatgtgtctataaatcgattaagtaactaatgtccactagggttaactacacccatacagaagttatattttctaatgacacgttggtgttttgtgattggaccctcgtgcccatatacaaaattgggccacaacatacattatttgaagccgacaaacgcgctacaagcaacgttgtttctgaatagcaaaaccaatcgaaaacatactcattcgaaccaatagttatgacgttactttttgcaccattctgatgagctcaaccgcttctgatgctaggatctagaccctgtcgaaggcaaacgggagaaacacattaagcgcccactaccatctatactaaacattcctttagcaaaactgcctctatcagttgtgagggatatgttattggcatacatcaggtcatttcctaaaagtacgtcttgtgggcgagatgatttacacgcccaacacctactagatgctatgagtgggtctgcatccgctgtagcaacaaactttataaaagctttgacattgattgtgaattatggttataaggtcgatgcccaggagtcttggtagaatttatagctagtacgatcttacccactctttaagccaagaaacgaaattcgcccaatagctgtgggtatggtttggcgtcgtctggtgtctaagattactatgaaaagaattactaaatatatgttctcattacctgaaagattgtctgtttggggttggtgtgcctggtggagcagaggcagttttgcatgctgtcaaagtttgtgtatgccaacaaggatgacacatctctcactatgttacttgtagattttcagaaatcttttaaccttgttgatcgaaccgctatactataaaaagtacgcatttattgcccgtccaattctccattggtagaatatatttattgttaatctgcgtgattatatttaggggtgtattcatatttggtcaacagttgggatccaataggatttatgttcaggaagcagttgaattgtttgactgcagctccggaagagaaacaccaaaaacgtccactaccatccttctgaaacgattgaaccaacagttaaaagatccccctgctggatcctagctgttgaccaaatatgagtaggccccaaatgtaatcgtgcaggttgtcaataaagatattcgacccatagggcaatgaatgtgtacctcttttagcataacggttcgatcaacaaaattgaaagcattctgaaagtctacaaggagcagagtaggagatgtgttatccttcttggcacaaaccaaacaattgcaatgtaaaattgcctccactccatcaggcacaccaaccccaaactgaaaatccttcaggtatgagaccatatcttagcaacttctttcgtagcaatcttggacactagacgacaccaaaccatgcccacaactattgggccgttacatgacttaaggagtggggtaagaggcgcactagctataaattctgccaagactcgtgggtagcaaccttgtaactataaattcacaaccgctgtcaaaacttccataaggtctttggctactgcgtatgcggccccactcatagcatctagtagctgttgggcgcttaaactatctcgcccacaagacgtccatttaggaaatgacttgatgcatgcaagtaacacatctctttcaactggtagaggtggctcaactagagaaatgtctggtggacgcttcaagtgtttctctcatttgccttcgacacatctgaatcctagcatcagaagtggttgagctcctcagaagggtgcaaaaagtaattggttttattcaaattgatagcaatgtcataactattggttcgaatattggtttgaatgagtatgttttcgattggttttgttattcagaagcaacgttgcttgtagcacgtttgtcctccgcttttatgtcattcctcaaatttatgaataaaatttcctctttattttgttttttgtaagggatatctaatattttgatgtaaaaatattccatgttatgtctttactgaacttatatattgaaacgtttgtcagaaacctattattgacagacttggagaagcttacga

SEQ ID NO: 14095 - DNA, 3021 bp, Aquilegia coerulea
  Intron number 1 from transcript AcoGoldSmith_v1.012435m (l ocus AcoGoldSmith_v1.012435m.g) derived from phytozome v7. 0 (chr-ID scaffold_26; pos 2505017 to 2508037)
cagcaatctcacaatctgctatctacgcgcctcaggttcgttcgctttattatacaaactgttatcaattgatgcaattaaaccattgactttaaagcgaacgaaaattgatattacaatttttcttttcttttttaaatttaaatttgtaatttaaatttatgcataacttataattcttctgattctaactttaaagtttactttttggactaacctcaattcatctgattatgggtaggacttaagaggtgatacatcagggtattgtacggtcaattatatttcctcaattgagctagctctcaatgataatgggtaggaggttttaactgcttttaattggctgattatcagtaggaggtttgaaccgtgagcaacctattggttataaactgcaaaaacttccatccatcatggatttatggtgtgtttgcttagcttgtggtttcaagttttcaacacatctcaattgtgtttatatgtagtatagttatgttgttaatgtagtactttcagtaaagtgcaaatttaaaactatgagctccttttgtatgttaaagaacagaggattttgtggactgaattgtgtcacaccaactacattatatgtgtggactgtgaatatgttcggtacctcttacccttttctatcatgcttcaattctacccagtagtacaaatgaatcaagtgaattattgtccttttacaaaatcacatgatgctgaataattttgaaaagtcaccagtttatccaagctttacattctcaaatttgtcttgggagtttcctatgactacatcaatttctaaaatgggatggtacagtactttctggaaaataacatcttttttttttcatgtaatttgagtttcataacttcattgcccttttttcttctaattgttgtttaggtcaccattgtatgtgttctttcataggatctcctatgatctatagttagtgaaagtactaattgttacgcatcgttggagtgattttcaaggaccattatattttgtgtcggcatcatattttggtctctacgacccacagctctttaaattgaaattctcaatctctatctctctcaacaaaacctacattcgaactcaatcttgataatccattgttacaattgaaattcccaatctatgtctctctccgttgaagaagcttgaagattttgaattggaactttgggttagttaaaatttagatagagtaatttaggttttatctaatcgacatcatcaatctatcttctctacacaagcattcaatctcatcgacatcaatcataatcaagtatatttttcaggaatgcaatttaaatatttacacatacgttgattagttattatgattgattgttaatagtatttttcaggtatacaattaaattttaaattttgatttaaacttagaaccatttacatcctgtaacctgaaaaatacaggattaacattgttatccaacctactgaatatacctaaaatatagaaccgtgatactttaaatttaaatatgtggatctgttctgaatcatgaagatgtttgtagattatatgctacatagggtgtatcggccactgaaaattaatagtcatgtcccctgtttttgaacattgtcctgtattccttatatttaaaaggacttctagcagggaagactacagctgctaacaaggataaggataagaagagaccagtttctcgatcatctcgtgctggtcttcaggtaaatcttatttttcttgaaataattttcaatatttatgaatattgaagaactaggtttagttcaggaagtagtggatctaaaagaatgcgtggtgagaaagaaaattatcacaacacttaaaacaattcataatgtgtaatttatctttgtggaaatatatgaactgggtaggagctgtattccgtatattttggtcatcttgagtgaagttaggattctgtagatttaatctttgtggtatagtttatctaatgaccaacaatataaatgatactgccagattgaatagacagttggtttaggccttgtttagcattagctcttctatattaacaatactgctgcattgacagttaatattaggtgtgtattctgcatgcaagtttaggcctaaaaatcaactaaagttagcattagcttttttttttttttttcccccagagttgcctgtttttgatgattttgagtgtaaggtttcgtttacctcaagagctttaatatatgtttgttcaatataaccttaagttataagcgacaacatgtatataagtttgtctatagacaaacatagagataactaagaccgtaggatcaaatcttataatctaacggttgggatataatttaagctccaccgaatatattttaaacattaagtctgtttgttaaaccttaattttcttcgtcttaatcctcttcgatttccatctccatctccatctccatctccatcatcgtcttgaatcgtgttcgtcatctactttttcatcatcctcttcgatttctattttcaaggtatgtggttatcatcttcaaggttaaattagaaacaagggttatcatatcttaatttttatttgtggagattcattaattttaaaaagttttacttaacaattatttccacaattatctaggccttttaggcacaattagcttcacaacagtgatggtttcagcaagcttaccgtttaccatgattaattaaatactgtaatgcaatttactatcataattctaagtacaaaacataatctgattttgttcaaacaacagtgaaagatatttgccttatatcaatttgctacgattgtttagacaaagattttcctcaagttcccttacaaattttggcaaagcggtaatggcagtatgacaccaagctcttcttatacagccacacaaaactaactgttgttccatctgttaaatttaagaatgatccataagtgttttatgtttatctcaattctttgaaacatatggcagaaggc

SEQ ID NO: 14096 - DNA, 1602 bp, Aquilegia coerulea
  Intron number 3 from transcript AcoGoldSmith_v1.008493m (l ocus AcoGoldSmith_v1.008493m.g) derived from phytozome v7. 0 (chr-ID scaffold_117; pos 141797 to 143398)
acggaaggaattatttaaagtatgtgatttatttttctgcccaatgccaaggtggtttatgtttaggaagaataatcacctgaagtatcaaaaccttctctactaagtactaaaaggcttacaagggttacaataattttctcatgtacgtttttttaaaactaataacaatagctgtctcataaaaattgatgcttcatattattccaattattttatatttttataatggttataactgttagacttggctcattttgacactttgcaatctccattttatggaattttcattgttcagatgaatttgtgcgtatatgttctcatgccaattgtgctcctatataatgtatatacttcttttacttttcaggaatttaattttatctaattttaccctttcgaaaatataggaaacacacagcataatttgcatggcttgctccatggacagtgatgccacatcaaacctacaactccatgagtccatgtgcctttaaaatttctattgaacttgtctttggcatcagaaataactctagatttctaagttttccttttgttcatggatattctttggagtatctcaacaagctttgttgagcatatttttgctctccgagaattgacttgtggattaatttttttgccattttcaaatatgagggaaaaggatcaagaaagactgaaaagatcagtgtcgtctttctctccattttcatgtgtgcaaatcatattttggtttttcattctgaatggttgtattcatagaaatgtcactgcatattagaagacgaagaattggccacaactgcatgatgacatttaatgctaattatcaatgccaacagtatgcatattccttgtttgtagttatacctaaaatgggtgccaagcacactttccccttctttttgtgccttagacatctaaaaatgtaagataagtcaaaactaccaaacagttcgcaacatggctcaccatgaataaaatgctatcttctatgtgatttggggttcactgtcctagccatatttgtcacaaactatataaggatcatgtaatgggaaaagaaaacatttggcaaaaggacttaacacatctgggagtaaaacaaaagtgtgttgtcttctgttttcattttaggcatttcaacttcaagttggaggagcgaaaaggaagattttgttgtcttacctatgtattcccggatgaaggggatgcagaccatgtttgctcgggttacagtaaattacatgatgccatttatagaaacaaatggttaagacagatgttgtctttgatatgtgggttggaaagcaagcttctgctcacttaaatggtgaataacgatgttaaatagtaaatactaatagattatacttagagaagaaagaaaatgaaaaacgatcggtacaacgagaaaaggtgcgaaactatagtcatagcttccccctgtgtattaacttgtttgtaatcgtaaattatttgatacatggctaaatgccattttgccattttggggaatctgtcccttagctttaaccgaactcttgttctatggcagatcagctgaacggtttgatcctagggaagcttcct

SEQ ID NO: 14097 - DNA, 1401 bp, Aquilegia coerulea
  Intron number 4 from transcript AcoGoldSmith_v1.026248m (l ocus AcoGoldSmith_v1.026248m.g) derived from phytozome v7. 0 (chr-ID scaffold_3; pos 2181223 to 2182623 reverse stran d)
aaaccatcacaatttccaacagttctcattgtctggtaaatgacttaccttaccatgtcaactaattttccataaagtagaattttcccacaacaccaacctggtagaattgtcaaaatggttactgtctaagtgtctatcatcatatattatgaaaatatatattatgtaaatattaatcttaaaagaaaggttaatatcagaagaatagcataaactaggatcaaatcctactacttgaaatgccaaattaagctatgaaacattcaactactagtcttacaaaccatggtatcgaatgcaagataaaactccatataaacaattcagaaaacatcaaaaccacttagacaaggaaatgtaacctcaaattttcttggtagaaccatcgaagacattcatttggaaaacagagttctttatcacttgataaagatcgttacctgcatcatgaagcccaagtgaagtatttcttcggaagcacttaaaagatgtgaaatagcatcatgatcattgttgtaccattctacaatactattaagtcctgttgaaacaaattagtagttttcttgtcaataagtagtagggagagaagtcgtactacgcaaaatactcatttcatcaaaaacactggctattaaaatctgaaaaccttgtaagattttgaaagacatactatggctttatggataacaggattagagaagatagacatacctgacgataaacaaattcaaacctgatgagccagatcactatgctagaaatgatcggaaccatctacttggaccatatgcttccaagccttctgacagaatatagacattttcagaggctctctttcagacaaggacctctggtgtataagattacattcttttaaaatgaaaacattccaagctgcttaaccaggaaattgccatgatctgatggagctcaaaactcactaattatgtaccaagcttattctgattttcagacatctttactgcaggaatatcccatgtccgagtgcaccattgagaaagacctgtactgaatctgttttgagaaacccgttcaatcataattatttgttaaaacaagatatggccctattcaatctttttctagccataataatcatgcacaaagtcacagaccgccaatagtgtgactggcttcctgtaagtatttctgaaagttatgtcatgtaaagagagttcctatatatactgatcaatcaatgtctaagatattctgccatgtttaaatgtttattatcattgcaaatgagggatctccaaagcaaatggtttaggtctttgacaataacagagaaacttcttattaacttgtgattgcagtttctctttgtatattacatgtaatgattgtttgcctcaattgcagttttacaac

SEQ ID NO: 14098 - DNA, 2147 bp, Aquilegia coerulea
  Intron number 2 from transcript AcoGoldSmith_v1.005432m (l ocus AcoGoldSmith_v1.005432m.g) derived from phytozome v7. 0 (chr-ID scaffold_41; pos 651814 to 653960)
tccttaaggtatcaactttaattttatacatgtgtctgtatgataaagttgttgtaaatattgatttctgctatgaagcttggattcaaggttattatagttgattatggaagaagagtagttatttggggggagttagtgagatgtccattgcattgggatttaggattgattgctgattttatattttgtacatgtactgaaataatttcatttgatagatagatggtttttttcctcacataacttcaatgatgtcttgctcaagttcttggattcattagtatttagtattgggggttttcagtgtatttatatcctctgaagttttagtagtaggggttttcaatatttcttttcttttaaagattgtgaaacatgaagtcaaaatgattttgcacactgttctgggaacaaatgatttacaactgcatttgcttatgggataagaaggatcgagtggactaataagcaataagaagtagacctatcagcacttctttattttcacctctgaagcactccagtcatttatgtcgtgcaatacttgacatccatctttgataactcttcattatacacattctatttaagctcacatggtttcacatcagtaatctaataatttcaagagctggtgggaggaggactcatttgtaggaaatgcgttatcttaggtaagaacgaagaagctcaaattttcctaggaaaatgttaaatgaatattaagaaatgaccaaaataatggtagcttcgtttacacgagtcttgggaggatgtaagagtctgattgtagtactaattggatagctttctttacacgagtgtattctttctgaacccatttgttccattaagtctggagaattcatgctaacattgagaaacaaggccttgtagtagcttctgagatttctagagtgcatggatgaacagcgatcatgtaaagtcgggtgttcatataaagtttgctgatcatcctttattcattggacttcttcccttgtttatattcatcacaatatacttgtctctacctggagttgaaccaagcagagatcattctatatagtgatttggtaaataggaatgttcaatagaatgtttgatactcttagttgaataccgtggatgattcagccacatctaagcagtttggtttgagatatatagataaaatgccatggttgcaaacaagcatagagtgatgggttgcacagtgttgaggttgaaagagttttctgtattgggtaaacatcgtcctttggatgttgggggtatggattagtagtatttgttatgtccaagaaacttcctcgtcaacttatcgaacaacatctagagcatcttttgttgcatctctatttttcattatttctttcgtactgttggtttcgacaatcacatgaagaaagaggaaaaattcttttttctttgtcataaaaatgatatatgtagaattgcaatgctgtataaaggtttaaccttgaaggataggatggcttaggtggggtatacgataacagcagggcgacttctaatgccaaaatatatttgacccatgccttggaattggtgggttataaaactaaagggtgaatgtctatgtaatgcaacatctcttttaggaacgagatgaatttatatcaaactaaagggtcagactgatatagtcttaggttctgcatttgtcttctatatgcctgtcaagtatattgagcgtttggcatcagagatacgtatttatatttcattgtgcttgcatctggcatcctggtatgaacatttgaggattgtagtttattctttattgcggatcagatgattgaaacttaagattgcgagtttgcaataattctagttttattttatttcatccaccatcttttgtgagcgagtttgctcagtaagtacaatttcatctgtatggtattctgtgcacttcatcttactgagaaccgttccttgttgcttgctcttgcataattgcctttgttgtttattgtttgtagaccatagtttggtggccttacagtgccaaaatgcttcactatcacccataggccataaccttaaaatatcttactaagcaactcttactttgtgctgcaggagacctggcgaggatagtgacggtgactattaca

SEQ ID NO: 14099 - DNA, 1833 bp, Aquilegia coerulea
  Intron number 4 from transcript AcoGoldSmith_v1.011710m (l ocus AcoGoldSmith_v1.011710m.g) derived from phytozome v7. 0 (chr-ID scaffold_60; pos 442236 to 444068)
tgcaggtcaagaagcggcatactcctcttttgaaggtctgaatgaatttctcttgagcattaatttttgtcattcataataatattagtagtattctatctatatatctatataatagctagacccaatgggtcccacactctctctcctatgtggcactctatatgatcatcaagctctcacaaattttctccaataaaacaaataaaaaaaaaaaattatactaattggttttataactaaattttgtatttttctacccttttccacatttcccactaaacccaaaaaatctctacccactttctctactctcctacaaagtataaacacaaacatacatttcaataatattaaaatcaaaacaacaaatatattcaaaacacaaattaatcaaatataaccaaacataataatttattttttatatatatatatatatataaataaaaaaaatagtacagataactttaatatgatataaatttaaaatttataaaaaatttctcatacaaaatctccaatcccagtgcgtagcacggggtccacaactagttacatgtataagtgtaagtgtggtctcgatataattcaagcgatgagtagtgccccgtagtattatctaactttctaaatcttttgattaacttttttatgtaagaaagtttttatggggccctttgatttaaaaccgaacctgcaacgcattttttcatttgggagggtactctgagtacagtgagtagtgggtataccatgtacgcatgaaggaaggtcttttaaatttattcggaggccatcctgagttttgtctcgcaaagaattcttcaccactatcagatgctgaaaacaagccaaacttacagcacaccatttaaatgatcaactgattaaggttgtaacagatagccatattttggtagcatccggcacatgtttaaagtcaaaacttaggttaatccattctgttgcagaagactttataatacccttctattcctgaaatagtttccatatcgttttgctctgtcaccttcttgttgctcatagagtctatgagctaatttaatcccaaaaattctgcgcgttctcatcttggggattggaggatgctagatgcttttatggtcaagcaatatcattgtaatgtcctaattctggatggagcttggtagcccttaaaatcctttgtgctaaatatctgcgccgtttgtgatgtttttccttttagaattagccaattaggtggtgtttaattacattaaatttcccaagcaagcaagtgaaggcaaacattcaggcacttttagcggaacaaaattattttacaggttgtggtattgggtggcatttgattgaaagttccttgttgtgtgaaaattatgttcagacttgagagtttgctgtgaatgttttttgttctcattagaggtggtcggtttgctttgttatggccaccccatattcactcagtgattttggagcaacctaaattttcagcctagttagcatgtttgtaaccagtctcctagtattttaactcctcaaatagtatccagtagcttgcacatagccagtctcctaatattctaaatcctcaaatactatccagtatcatgcatataaccagtctcctaatattctaaatcctcagaatactagccagtatcttgtatctgtcccagatcatattgtttttatagcaattggtacattatatgtaagaagacttgccttgtcctatattctcataaaattatctattttggttgtcgtggtaattgctacattaggtttgattttagatttgcttctgaatgcaggttaggacat

SEQ ID NO: 14100 - DNA, 2652 bp, Aquilegia coerulea
  Intron number 3 from transcript AcoGoldSmith_v1.012219m (l ocus AcoGoldSmith_v1.012219m.g) derived from phytozome v7. 0 (chr-ID scaffold_7; pos 6111295 to 6113946)
tcgcattttaggttcttttttttttaacctcttgtttcttttttctgtcataaatttaaataaaatggaataacattattgaatttgtaaatgcaatacacagaatcaagtggaaaaggataatgaattactgagtagaaaattccttcaaagtccaaacttcaaacctttttgtgtcaagactcaagagttgatacatgaatgccctcttatatatgtacacaaaatgtttttgtttttaattattctatttgattctatgtagaagaccattaaatattggcataccgtattatgtgtaaatttatactttgttataccattgtctacttcgtacaaatagtgtgtctacttcccctgaaacagtcattaaaaattgtgctactttaacttattgtcgtgtttattatttttctgtatctttgctaagatttaagggggtccaaatatgtgattatacataggataaaggggcgaggatacccaatatgatcatattattacaaatgtctatgctattttacacaagaaatggcagtacatatgatattatctctttttttgttcctgctaggtacgtaaccgccaaactgactatggtgagtttcaaaaccttcatgatttgtctctaagagccattaatatcatacctaattttcttagatccccatctttggcgtgcgagtcattccggttttaggaaaatcattgtctatgattcaacaacatggttgttacccaaacatgtttaccatattcagtacttattagctatctatgttatgtatatgactgtgtctagagtgtaggcatgacaaacccattttcatttcgctttgatatctctcaatgatttactatacctggaagcttagtatctttagcttgctcatgatttagtgttttctttttgtgtttgcttttaaacttggagtcctatcatcatttagtatatatgaataatgtttctagaaattaaggcaaacgatcaaaagataaatattctaatggattcaacaaattcgtctatatagccacttaacaagatacgtttttaggatcttgtcctgatgattggtgagcagaagtaaatcagaaatgtgaacgtcttccaaagtatcacaccatcttaattggtgactcggcggtgatgtatttttggaccgaggtgatttgagagtagtatatatatttattcttttattgacatagaaagtaaatctttttaggcaacctagaaagtatgggttacattacatccaacacaaaaattgaagagaagatgccctgacaaattcatagatcatgtggctaggttccatcatcttcctattaaatattctttttaacaattcaagcaaagctctaaaggaacaacaaatggaaagaagcaaggagatcctattaccttattaccaggaaggccaaaatacaagttggagtggaaagaaagaagtcagctaaatagtaagaataaaagattaataatgtttgtttcgcttagaaacttcgtctatggtgagctctagggaagcgagccaaccaaaaagaacatgaaatagctatggacttcaaattgtagagccaacgaagttggaggatgaacaggcctgataaggattatgatttccggtgggattgtgttttaaaatctttggaatgcataagttactagatcttgtagttttgatttgattcttgatgttgtacaattcagagggggttgaaccatttggccacaagcccacaatgacaacaatatcttttgtaaattcaatgatgcctgcccaatcagtagcctgaaaatgggatgcaccaaagaaagtccagagaaaacatttgtaaactatgcagatgctctgacaaggtcctaacactcggtgtgttatcgagacctgatgctatacttatcgttgcttttctatctttcattcattgagatccaaagtacaatttatatgtgtctggttaaagatgaaactttactgagataaagtgatctagcttgcgatatcctttacaagacaaccacaaagtctggtatccaatcccataaatcaatttgtgatcccatacatgatacaaggatcccttgattaagcaaccaaccaatcaaaatgcatgtttttgaactccttgtcaccttttgaacaatttatacccactcacttgttatcgtatctaagaatctcacttgatctttttcatatcgggtaaattatacgacttgtcttgtactgattataatgtggtagtaaattgtatattgttttggttttttacacaagcgaagcaatatcttggaagctcagatcttgctttatgctgaaaccttcctctttgttatgaagtctcttagctctgtaatatattgcagttaattactaaatatgcaaacctactatgtagtcagtgtgattcatcgcttcacgtttttccctcattccttgtaggcttgtacactgcatacgctgaaagttacaggggccacaaaattatagttatttcggattatatgcatagatatagataaactaattcttgaattcacgtatttctattgcacatatgggtgatccattatagtatcagtatcctgtttgatacttgctttcccattgatgtagataactgtattttgtaggtacttga

SEQ ID NO: 14101 - DNA, 1368 bp, Aquilegia coerulea
  Intron number 1 from transcript AcoGoldSmith_v1.011322m (l ocus AcoGoldSmith_v1.011322m.g) derived from phytozome v7. 0 (chr-ID scaffold_18; pos 4632050 to 4633417)
aacaacaacctcatttcggatccgtctggaacaaagtaagttcattaattaatttctcaattctcatcatcctaatcaaatcaaatttatactaatattaatgtttttttttatattgttcagttcataataatgtatttatattgataatcggtattggtattggtattattccacaccaccattcataaacaaaacaaaacaatactctcacgctgtcttaataatattggaaatctatattatatactcgcaaagtaacagtaggactggaggaatgtgattctgttttttgtaatttagaaagcagcagtagggaggagtgaggagtggctagggatatgatatgagagagataaaaaaaaaaaaaaaaaaaaaaaaaggttgttctctttcatctccttaaaatataaaactgcaaactgtgaggacccactttacgaaacaggagttgagtaaggaggaaggaaacgagaaacaagattgagagagggagagagatattccaacctaatccaacaaactctcctgaaatgaaccttcaaaagctaacgactaatgttataatctcgagaaacccaacttctaacagtctccagctcccctcaaaaggaatataatttcttaatcagctagagcacctgttttaaaatttgcttccatgatcacagatacaacttttcggcgatcgattggacttcaatgagaagttgtgactcattataaacaagtatattcttaatgcatttcattggtttaaacttgtttctttatagttatgcatgggagtgcatatacatagtgaaggtaacaagcaattattaggcatcatcttttatgttaaaaaagaagatatggatggacacaaagaaagatcttactattgatgaaaagtgggaagaggcatgccttcggtttaggtaacgtcttcgccaggagagagtatcaggttccatcaaccacaaaagtatagtgaatagaaaattctacttgaagattgcagtcccatgatgagaatttacaaattttacatggagtcccataactcccatggtgatcattcacacccaggattataacatttggtttttttttcccctgtataacgaaattagtttttcggcttaacaacataagatttttggatgtagatgataatttactctgtatgcttcgtagtgggttaaatctgcagccattagaatagattgttgacattttatatacaatctaactagaatatttcatcaaactttctcagttgagtgtttagattttagaaaattataaagaattcagttcatgttgtctaatttagaataatgtttttatgacaactaactgttcgtgttatatgtaggctggaac

SEQ ID NO: 14102 - DNA, 2361 bp, Aquilegia coerulea
  Intron number 2 from transcript AcoGoldSmith_v1.018755m (l ocus AcoGoldSmith_v1.018755m.g) derived from phytozome v7. 0 (chr-ID scaffold_17; pos 3202128 to 3204488 reverse stra nd)
tgcatttacaaaaggtaatttgttcaaacagataaccctttttctaattccaagtatttctatatgatgccctttgcttaatcgttagtttacccgttttagattctttgtattttgagtttacccgttttagattctttggactttggtataagggattaagggttgaagttgtgggcggattatgccaatatccggtcggatcttcatcgaagcataaaactcaccatttcgattgatatttgccggatattcgccggaattgagggattacagcggatttacagataaacattgaaaatccatgtttttttttttaacttaattattatttttaaacttttctctgagcttctgcttcttctctatcatttgattgtaaaaaagaaaaggaaaaaaaaaagagaagaaagagacttagaatttacttacaaaattataatttaatacctaaattagataagatatttcttactgattcttagggattgtggacccatgtttatgttatttgtaaacatatttagtaatctaccgtatcaaggaactcaaacatgtgtctgtccctttttttttttttttttttttcatttttaatctttcctcttttctttcactctctcttcacctaacgtcggtctccacggttctttatttaaataatgtatatctccccgatattttgaaatttcgtgaaaaatcacgattttttattaacctaaacctcccaattctgacacataggctcgaaatttcgcggtattatccgtttttttgtacctcgaaatttcgtccggattcggtattttaatctatgctctgatgtataatgacattcaagaatgggttttttttgctttaccctttaatatagacatggttgtagcgtgctctgattccgagtgtttggaaaaatcgataataaatcattaaaccctaagtgcggaataactaggattagaagaaacaagtaatgataataagaaaaacgaaaccaatacacaagatatacgtggtggaactctaatggggaataaactagcaaaacaaagaactttattatcttcaaccaagatgagatctcacacaactcactctcacaccctttacaagaagaaaacaaacctagaaatctcccatagagattgctcccagttttcaccaaaagcctcccaaacctcgaatctccaagttttgaatatctcaccaaaaacctcccaaatctccaagttttgaatctctcaaaacttctttagaattttgtttctcatggcttccaaaacataattaaggtttcctacatcattgttttataggtacaacttacaacaaacttagggtttgccacgaaattgggcctaaactgggcccataactactgcaaaaatctgttgtccagtctgctgctactaccaggtctgctgcatgtcagaacttcaaggacgatttcccgactgcatactgagagttagaaatcatgtcatatgccattagaaagccagacgagtctactttctaacccaacaaacagatcatgattccaagtactgagaacgaagttatgtctattttgttacagcgtgtcaaaactgaacataacaaaaaactgaacaacatcgagatattgcaattttacctttaagtttgcagggtgtggtatcagactgctcccgcattagtcttttgaattaattaagggtatatattactaattcactaggtgtggtttagtggtggacaatatagttgttagaagcatggaggattgtaggatcaaggtttagtagtcagctttcagctcctggacagctcgggatttcgagtagtattattatttggttttgaacatggcaaaatgttgtgtgttgtatacttgtatgtaggttgtcatcttggaagaactataaaaaatcagtattattttatctagttagttgatgctttgatagtggagacttgaagttgtctatagggaacaatttataatatgacctgaataagtgttgaatttcataatggcaagatatcgtgagataaatctatgggaagaaataattactatgaatcttattatcaatatgtgatagtaaaacacattttctcagtgtattgatgttctgagggtcacggagttttggaactcccagaaggtcgttgaagtcatatcaaaactccatttgtagatcatagacatgatcacatgaatacatgattacttaatgatggatttagttatgttatgtttattttttatttattttttgagatcactattagttatgttatgtttattggttgttaaaaagttggttcttttctgcaacaggggagatcatactagagtctgccattctgacagca

SEQ ID NO: 14103 - DNA, 2266 bp, Aquilegia coerulea
  Intron number 1 from transcript AcoGoldSmith_v1.005513m (l ocus AcoGoldSmith_v1.005513m.g) derived from phytozome v7. 0 (chr-ID scaffold_1; pos 1973792 to 1976057)
gattcacaatatcgatttcacaatcttgtaactttgtaagtgtaatcttgtctctattttgcaatttttaagctatactagattactaaactaacttttttttttttttttttttgttagtttctctgatccataaaatttcaatttttttttgattagttaattttgaatctttttttattgtatagtttaactaggaaaattgagaataatgttcaggttgattatgttacacctgtgagtgaggaagttggttttaatttaaacatttcccacctttttattgcattaggtctaggtgttctccctctttcttatagtagttaaaatatcaggttttaaatcaaaagaatttaggagcaactctaatgatgtggctactacaagtttgatggtgccacatagggacaataagcaacaaagattgcgaggtctgagtttaaggcctccccaaaatcattgctaattttcccaaaacagccaatgagccttatagaatggttgatatttaattatgcgtgttcccaatcactaactcggaggtggtgtatgttcatcatgccctctctgtaataaaacagatgcaagtattcactagctaggatctagacttaagacagttatcaggagagaagatagagtggtgaaaacgcctttgtttggtacgtatttcaaggtagcacgcaacagataaataagaaagcccgcgatgttatgaaaacattatttatcatggaatggcttacagtctttattgcctaaaatctgtagagacaaggttctcattagaacaaccattgaatattacattgcggtagatccggttagaaaagaatgtagcacaactatgagttcagtttgtaatgggaatgtcacaagactataatggaagcacaatccatacaaggggagcgcttgaatgttcttcattgcagtttttcagcagactcaggatttggacaacctctttttttttttttttttaccttttctctttataagctcatttatgagaagcctacatttaacaatcaaaagtccgatattataacagttactgcagttgtttggaagctgtcttgggtgtctgtattttcttactttgacccacattttgtgtcggtatgtattgtgataacttaaggttagaatggctctagtataacccaaggaatttttttttcccttttttttcttattatgtatgtagaggtcatcagtcatcactcatcacaatgttttacgtacaaccattcaggtctgactccagtattcgagatttatccctgggaatctaattcatacaaaggcatgggatccagtatttgtcaaggttatagtttggatttgatcatcatatacctgctactgagagatgtaattcgttttggatttcatgtctctttagccaaaatacaaatctgttctatcttttgcttttgaagatgaagattcaaattcttcctcagattttgtctggggttttgctatgtaaattttggtgctttattatcaatgtccagtacacttaagtactcaaataaaaatcataatgttttagataaacattgtgatttttgttcttcactttgtattaggaaggtgttatgtgttgtgtttgatttgagtttacttgtctttttctgtagcaaataagcccaacttaagaccatttacaaatataagaacttcattaccagagttaaggtagatggcccaaagatactcttaacttcttaagtactttttggcctcaaagaaagagtccggtagattggaactacatcacaagtactttttgacctcaaagagtagagtagatttgaacatgtggtgttgcatttgctgatcacatacgtcatcatgtcatgctgaagtcttgttttctttttagattctccttacaagcgagactgtaattatgaatcttcattcagcaatagttgtgctgcaatttgtttcctgcataaatgtttttgttaccatttataccaacttcaaaggttgttttaatttgttttggggagtcctgattattttctcctgtcagaatgttttttgtgcttgaagcttttatcggaagagctatgcctttttatgccctttttatatttgcaatctggctatgaatactttgtacaacaataagcttatgcgatgaactgttgatccatgtttttctttccttttctgacaataaatagttataatattttgtattgaattttgtttttaatatatgtgtctttgtttcatcacagatctt

SEQ ID NO: 14104 - DNA, 948 bp, Aquilegia coerulea
  Intron number 3 from transcript AcoGoldSmith_v1.016741m (l ocus AcoGoldSmith_v1.016741m.g) derived from phytozome v7. 0 (chr-ID scaffold_3; pos 5466281 to 5467228)
ttacagtacttcaatcagtacttagaccttatcaggtatttgtttacactcatatagtaaggttgttggagttggaattgatttggttttacttcagtgatttacttttggaatggttacgattcacaaaatgacaagctttttcgcaagtcccaaatatcaatcctatatattacctgtctttgattcatgaaattagaactccacgggaaatgaggtacaacaaaaaaagtagaatactacaatgttagggaaaaaagaggttaggaaagacatagaaaggtgagatcccatatctgttggggcaaaatcaggaaagtgaattgcctttctgttagataggagcttgttactgtcatacatcttttttttttttttttttttttgtagatcatatcccactattttctcatttctttatcgcttgtactgttcatctccgtgatggacattgcttacctaatattgtcagactcaaatagcaagaatgtagtttgttcattttggtgccggtacatgagtgtggatcttttagtcttagcttctcttgggtgatcaatgatttgtgtttgtggtgatatatgcgttgatgcccttcttcatagcatttcattattctaatcaatagtatgaatgtaggtagcaaattagagttgagtaatggactttgtatcttatttattattcgtaaatcaccttgaatctttctgctatttgttgaagtcctttattcttaattatcaatctgttattttttggactgtggatgggtctctacgcgtggagttagaaatgaaattgtagtatcttgatagctatttgaatgcacatggaatatgagtagatgaaagagaatcttacttctttgttttgggatgttagtcttacttcagattaatttgtaaattttcagtacttcttgaacccaaagcttgaaaaggagccagt

SEQ ID NO: 14105 - DNA, 1123 bp, Aquilegia coerulea
  Intron number 1 from transcript AcoGoldSmith_v1.005909m (l ocus AcoGoldSmith_v1.005909m.g) derived from phytozome v7. 0 (chr-ID scaffold_5; pos 380945 to 382067 reverse strand)
ctcttcactagcaggtaatttggtttattggatcttttcttcatctggggtttctaatattcttgaaatttttatcaagtttactgttttatttcgtttgataaaacaaaaaaaaaaaaaaatgcaagtttgggactgttgcattttcatggattttgctgttttttcaatgaatttagctattttcaagcaaatcagaaaagctgttatttctgttaatggtttttatatgtttgattggattgcttaatggttttgtgcactttttgcactgtgggtatcattgattttgatgaattaaggacttgttttgtggaaatttgtgtttatttcatttgaattcccatggatttcctcgtatcagtgaagtggcacttctgatttttggaaattgcgactgagaaaatttttgttaatttttacaaaaaaaatcttaagaaatacatttcttttatttttgtggatattcattctcattttcaatcaaccacaatttttttttctaaaattgctctgatcactgaagagatttggttgctgaatttttatgcgtggcttatagttacacacatatggattcagatctgataatgggaatcatgggatgattcaaatcctatgtattttaattggagtaaaaatagtactatatgtggttgctgttaagagcttgactttaaaagtctttgcttcaaattagagtcaatgtaataatagagtctacccaataccactagtcttgctgaaagttgtttgatgatttcgtttttgaaagaaaacccaatcttcccattatcttggtagatttaattgtgagtactacattcgattattgtcttctgtgtcttgaccagtacttcaaagtccttaatcttacggttcacgtatcccaaactttaaatgtgtctacccagtctccatcgtaccatttattttcataagttggatgttctcatgaaggtaacctattccattaagtatctgtagtatactatggtatttattttattggaatgtagtatgctgtgtggtattgttgacataaaatgtagagaaatttaattttctgcaaatttcgtttttgacagattgtggacagaacctgaaactagagatttaacaa

SEQ ID NO: 14106 - DNA, 3487 bp, Aquilegia coerulea
  Intron number 2 from transcript AcoGoldSmith_v1.008207m (l ocus AcoGoldSmith_v1.008207m.g) derived from phytozome v7. 0 (chr-ID scaffold_60; pos 824790 to 828276 reverse strand )
ctactagattcgaatctcaaggacgtccttgtaaggtatatgtatgataatgtatattatggaattgttttttttttttttttggccaaattatggagtactctactacttattagccaagtaggcatattatttacaatcatttgcattgaatacaacttgtatagtggcaactgaaaaatgtaggagagtagctaactgatttaacaaaatcttcaaactaagggaattttggacagtggttgttttactcgatcatcatcatacaagcaagacatggaaatgatgcagctcatttcatgtttgcattaaaaaaattgattcagcaagcatttataggtatccattgaacaataattatgtcacgaccggaattttaaaaaataaaaataaaataaacctaggccgcaacaatttctaactcaaaaccaaatccaacaaaaatcttaaataatatacactaaaggaaaaattcaaacgatagataccaattatacaaattacttacatcaataaaatacatgaatacaacgttcgaatcaaataaaaaaaaaaaaaaaaaaaaaaatctaaagatctctactgatcccaacaagcgtttgtcatagctccatagccctaacctctcctgcctacattccatttagaattccaaatagaacacacccacgtgcaaaacaaagcaacatggatcaacataaaagctggtatgagtaaacaaggggaaaatctattcccacaacataacataatatatttaaagtaccaacatacgattaaaagataactcttccatgccaagaccataatcacacactaaaagccatattcttctcgagcattcaatcatattaaactttttatccaagccgtaatcatatgtttaattccattattaaatcccaacatattgatttacaaagtcatcggatcgatactaaaattatattaccttaaacaacaactgtttttaaagataggtctgcccacctgcacaaaataaattagttgacctatccacctgcaaaacagagttaatacctagtaggcaaatatagttgacttcattaaaataaactaaatcacatacacgttattaatcatctaatactcaaacaataccagaaaatatatttcgttcattcaaattattaatcctttcaacttttataggtttccatcaactaaaacatcatcgcaattatgattattagtttccaccatatgaaattctatggttcctcaatgtcatcattgttatctcagtttcacaacacaagtatatacatttcactcatagtattaattaacaacaagttctaagaaactcataagcattataatcattctaacatcgatcaaaatcacaaaaccacgacctggcctctattcggttctcgggtttaacaatctgtgtaaccacaacatatgcccaatcactagtacaccttacacatgatgcactccacgcatttgtgatgtaggacatgttaggagttactattttaattctgagtatgaaatagattctagaatatgctattttagatctaagtcatattatattgggagttagtatatttttagaagtcgttttagtttagaagtcctttacttgttaaacaagcttcttgttctataaggaagctctaggttattgtaatagttaggttgattattattgaattgaatagaagaattgcttcttgagttatccttgttttcttgctagattattcatcttttccttctttttacttggtggattccaagcttcacgttcgtctaggttcctaaccctatcttctcatcttctttgagagattcttatctctttcttctaagttctacattaatttgccgtacccacactgcaacagtgtgccttgagcatggttaagaacctctacgcggaaaccaaaacccaagtgggtgctcacctgcaagcttggctagccttgatgtatccctaactcatgatctctaatagctcccttgagctttctaatgtggcccctagactaaccccgaaggctatgaaggtctgtagggtcaattctgtaggctaagccgtctaggaaatacccaaatatacctaaatttattcttctacatagtaatttaactacaataaaaatttgaagccgtttcgataaccaaaaggtaagtaaacaatcgttttccccagacataacagaattcagaaacatatgaacaattatgttgctaaatttgtactttaaaactactcactcaaatcaagtgattttcgagtatgttattcaaaattgtgttttcaatcaagttaaatgccacgtttattagtttgaatctgactatagcagtttagagaaaacagactgcaactgttcataaatgatttatttctcctagaccataaatccggtaaatctaaaattttagtatgttgtttaggattcttcattgtatatggacaaattatttcatgaattttggacgttgggaagatatataaaatctacaaaattcgtacctatttatattctttaataaacatgaaaaattaaaactataaaaatagtttgaaagtttgtactcacttctacaagcaataaaatccaaatcttcttctagcttccttctagttgtttttcttcattataagaaaatgtatggaaaccctaagattttactataaataatatggacaatttaacgggctttattcttggaccataaatgaatctgtcatccagcccaaatccatctacttatttaattatcaatatttcatccttcaatttaatattaaattaactccaaacccctaaaggacatgtatgtaatattttataatcaaataaaatttaaagaataaagatttataaaaatggggttttacaagttacagaaagtattacctttcaaaaaaaagttacagatcagaaatacctgataaaaagtatgggaaaaaaatactcacaaatccaaggagtagaagatatgtacaagtagagtgaggtgaagataagtcgaggggacagagcgcaagatactttagtgagaggtattgaaagagtagatggaatggaaattgaacacaggaagttaacagacattgagttgggagattagtggattagagggagtctacgagaagcttctgaactgaggattttttgtttattgaaattttttggatttgttggtagggatttttcatccttctgcttagtagtaatctttttttttttataaagtattgactataaattgcatatttcataataatgttgtatatctaggcctataaagtttaaaacgacattttgttcaatgcctataaagtttaactggaatagaagtttgtttatgatttttttttttttttttttttttttaacgtggctaaatgttatgtgggttggttttggaatttttattgtgtcaagtactttgtttctggataggtgctcgagaaggaagcttttcaaaagcaactgtt

SEQ ID NO: 14107 - DNA, 2220 bp, Aquilegia coerulea
  Intron number 1 from transcript AcoGoldSmith_v1.000319m (l ocus AcoGoldSmith_v1.000319m.g) derived from phytozome v7. 0 (chr-ID scaffold_5; pos 533546 to 535765 reverse strand)
gaagaatcaacccatcttctcaagtaagtttttttttttttttaattattattattgtttttgagatttttttttaagttattgggagattgacattgaaacaaaagtgggattttgtttaattcaaattcatttcaataatggggtattttttaatctaataattattaataagattaaaaattatactaatatgattatatgattattatacttattatcagggaagagttatggcttggacttatatgtttggccagttgaaagaaatcacgaagaagttatagttgaaaactcactaaatcaatatcataacaaaattaacgttttcgggaagaaattcaacaatgtatgaaacaacagtaaaaagtaacaaaaatgaaagttattctttatgtagtatactattattatcacttttcttgtgtaaagttatcaatagattgtaatatatttgagaacactatcaagtgtgaagggcactgtagatactaaaagaattatgtggctttgtttatggaattccctgaatatagacatagacaaagttgcaacaactattcaaaatttgaataaggtcactaactcatgatcatacctgcatgtttgacttgtctttttttctattttttattttttcttcaaaactcaatttatatatacagtagaacggtataattgacaggcacttgttattgaaaaaatttgagttgcttttttttttttagaatcgcaatggcaatggcaaaatcaacttcttttctattcatctaaatctacaaaatctaaaataatggtccttagctcattaacatacatgaaacaagtatagattgattagacttgacagattgtcagtttaggggtgcatatttatttgtaaaggaattttgaacatgtaaatgttgtctgaaacgaacatgtaaatgcggtatttggctggagcggaattgaaggcattttcaggaccttcagggggacttggcacacaccatccttgacatcaaaggtcttttatggctttgatgtaagagattgtttggactatggggaaagtcctcatgcatcatttgccttctcctgggagtctgttcttagtgaacctttgatgtactatatattttttcgtttctgtagcttgttttgtatttgtatgtttcctgaccatggacatctcgtcccttggctcgcttgtactgaactttaatgataaacatacttgcttgtctttcggaaaagaagtattttgatattctgcatgttctactctgcatatgtgtgtgtagtccactcaatgcaaaatattttccccattgcataccccttatacgagcagtgcatctttttctctgtggaaaccgttttataatctctactgtttcgtttgaacattggtttcgtttgaaagatatatagcattcccttcttggcaaaacactaatgatattatcaaattgactcgtggatcacttatttttggcattttcagatttagttagtaaactacgaaagtttaaagcaagaactaattctatgtccccagttatcagtctctctagtctctccatatattcgtgttctattgtttttgttcttttcacatactctgtgtctacataatatgccattgcatatcagcgagtgggaattggcttcaaaccatacatccttattgttggcaaaatggtgagttcacctcccatgtttggttaggtgtggggctaaccgtgtgtgtggcccatgactcctttgtgggtgagtgggccacctaactaaaacatgggaggtggactcaccaacaacacttatgatgattcttaaggcaacctctatttgtatgctacttattatgttgcaaactgtgtatttatgctcccaaattacaactaccagggggtctgaggtagttatttgtaggattgctcaccaagtatttaatgcttatgcaatttaatctgtgcataaaatttgtctatcaaaataattagtaaaagatatatagccacttgtcaatatgatttgttctccccgaatgatttccagttgattagatttgtggcaacagatttctctgttagctaatgaataatctgactgagactctaaatcactggcttcacattttcgatttatcgatatctgggtattaaatcttagtttggattttttcaattgttgcttgcagttatcttcttggtccgataaatatcagggaacggg

SEQ ID NO: 14108 - DNA, 1749 bp, Aquilegia coerulea
  Intron number 16 from transcript AcoGoldSmith_v1.013599m ( locus AcoGoldSmith_v1.013599m.g) derived from phytozome v7 .0 (chr-ID scaffold_16; pos 2433222 to 2434970)
caacttactacacaatagagtgcaaggaaatacaggtatctccatcatatcatagaatgttgctgagaataatatattcgcttatgtctattgttataaatttgtttatattatttagtatactacttatggtggtgttcgtggattgaaatgatcctgaaaaaatgtcaacacccctcaatgaaatcaaggaagtgtcgtcaggatattggtgcacattaagataataaggaattcctgtaagatccagtcatccagagttccaggttcatatagttttacgtagtagtttatcaacagaatgtatcatggtttgcaggggtttgactataacaaatttcactcattttgaccttttgattaaaacttttgtacagttagttctctcttcactagctctacattttggttataaaaacattgatttaggagcgaagcaacaattaaagagccattgttacatatccatatcactgttttttgacatcttcaagctctaaaaaacttgaactctaaacactggttaatcgccaaaaaatattaatgtttgatggatgaaaagtttttttttgttacatattgatgaaataagctacaaaaaatgaaaaaataaaaaaccaggctccttagtcgatttaacaaattgttcagactaactgcttattccacaaactgtatgaaaaaaacattgtttagcacgggggtgagagtggactacgtactaaatactcttgttatctgacgtcgtgggctgattgtgaatataatgtactctctgccctcccatgaattttttcgatcttgtcttaagtagatttacgtctattcatcagtttcagtgttatgcaattaactatttttctcgtcctttatcttttaatgtaacttagggtctgtttgatttgggcgggaaaagagtttaccgggaaatagatttaccatgtgcaaatattcgggaaataaaattttgataaaatagttataatgctacattgatcatgaatttttttgaaaaatcatttaaatatgtttgtagtgagagtttgacaaaattgagctctaatttgtcccaacattttaacttatcatgtcattttaaatatttaccgcttattttctatttaatcaaacatgggaaattaagatttcccggaaaatctatttcccggactcgaatcaaacagactcttagttgaaaatcaaacctttgttgatctttcatcttaatccactacatttggaaaagttttattctatagatttgaattattgcctctatcattctaacttctgagcatctcaagcttgtagctacaagttaagactttctggaacaaaaacttaatgctgtcattaattaggatgctgtcctctatctactatctactttcgaatatcattttgataatatcaaacatatcatatctcttattttcaactggatgcccttttgtcatgttctcaataaaagtatgtagtcaatacaaaagctatttaggcagtgaatatttcatgaaattactcttgcctcttgccttgttggcatttttaatatttgttttacctctttgttttgggcattgtatgtatgtatcagttcatactgggtattgattggtcaatggtaacatgtttatactctataatcacaactatttggatgtagttattgtataattattctgtgtgtcgggtttccattttgtgatggcaggggcacgtgaactagaggagcactttgtggagtta

SEQ ID NO: 14109 - DNA, 2626 bp, Aquilegia coerulea
  Intron number 1 from transcript AcoGoldSmith_v1.009622m (l ocus AcoGoldSmith_v1.009622m.g) derived from phytozome v7. 0 (chr-ID scaffold_14; pos 4703378 to 4706003 reverse stra nd)
ggggttctaccaagacattgggtaactttgttaaggtataaatatttacctctttattatacatatatgatttgcatcaattaacatgttagtgaaacatagagaatatgttcttatacacatttaaattgctttcttttagttgctcttatttttaagattaattggtatctatttttccttttgcattgcctattttggttcgccatatttttctatttatgctacattttactgagaaccccattactgtagatggctttgaagcaaacatgtttatagtatcatcattatgctattttactatgtcagagcatcaattctattgaacacggtatatataagttaggagtcagaacttttaatgggattcaatatgcattggtcttatctacagtcggaattgggttttggtcatggcaatgccagagtgtattgaactttgttattttatgtcttgtttttggcatttttgagctttgaacctttgtattatttagaaatgtggagactaaatatgaaatgtctttatgttgttaatacagaggaatataaatatggcaagatatcgtttcagttgcccttttatttgattggtgatttgattgttgcttgtctacatttgtttagcttaagttctatagatattttttgcatatatgtatctaatatgtataggtgtattggacattatttaaggcttctatcctctgctatataaataaaattggagactctatacaatgtctctatgttgccaataacagaggaagagaaacaaggcaagatatcgtttcactcgcccttatatttggttggcgatttgattgttgcttgtctacattaccttttcttagttttatttttctctggatttttagtctattttggcgtatattaatttaatgtctttctaagatctgtattataaataaattagggacttgatatgaactgacactttgttgaataaaaaccaaacatgaaatgtctaaattagatcccttctttggatttatagctttttttgcacttaatggaaacattctctacttgccttggaattttttacctaggtgatttctttatattttctatgttttgtgcctgtaattcttttccaaagcaatgatgtttaaagctttcttcgttccaattttgtagttatagttgccttttttaaggctggaattggaatacttgtatttctgttagatggaattatatttgtttggttaatgaaactgaaaatttggctcgatgattacatgcctgattttggcaatatacgctatactaagtgatatgttatatcactaggctgagaattatcttatgagagctccaatatagtattctgtttttcctatgctattttcatttgtattatgccctgagttcgaatgcacagccattttttagttattgatttgattttatttgtttaggattatcccttgatttactgctcttcttcatacactatggcttctacatcaggttattgaaatcactagttctgtggtgatgaattttgaaaattttcacatgtcagacttcagagatttctctggaaatccatgagaagagaattcatttctgagcagaagggatttgttgaattatatatcatcctatttttaacgttgtttctagagatttttggacataccctccatttgaaagtcgaaatttgagataccccccatttgaaattttttttgatgatttattggtgtagttatgcgaagttgtcctgagatacaaacattcacggttcttagaaaaatactgtatttagttgttggcagtaagacttctatgtattagcttcactagtaatctcagaatatatttttaaatgcattaacgaaacatacttttgcggtgatgaactctgaaatcttcacatgtcagacttcagagatttctcaagagatctatgagaatagaattcattttctgagcagagtttattccgtcatttctgtctacaaagttaaaggctcagaatgctatgttaattttgacctgctaatgattattgaggaagtttctataaattgagacttctgcatattgttttttcataattcgttagttttagtagttgtctctaagtttatttctcaatgcattaatgaatggtctgtggtgatgaattttgaaatcttcacatgtcagacttcagaggtttctcttgagatctatgagaagagaattcattttctgagcagagattgttccatcatttcaactatctatctatgaagtttacatctcgaaaagctatgttaattttgtgcttttaatgattgtcagtttctataaattaacatttattaacttgaaagccttcgtatttatacaactgtgcatttaaatgtagtgtgaggaatatggtaaagtagatggaattgtcttgttatgctggtataggatgatgccttatattggtatagtagtagatgtatgctggcatctgatgttttacttattattaatctgattattgtatagtgctatctgtgttacttgtgacgtgagatttcatgtatgatgtcgccttattattattgttctgtttttgccacgcaggcaacttttgactgtctactgaaaactt

SEQ ID NO: 14110 - DNA, 2734 bp, Aquilegia coerulea
  Intron number 8 from transcript AcoGoldSmith_v1.004355m (l ocus AcoGoldSmith_v1.004326m.g) derived from phytozome v7. 0 (chr-ID scaffold_103; pos 83146 to 85879 reverse strand)
agcctttttgaaaaggtacgacatgtttgacctctttctttctttcttcttttttttttttactttggcgacctgtttgatagtaaatagtatgtcataatcatggttcaaatcgtgatttatatcgatattttgcgatgtttactgttttctcagcttgccagtacgatcctgtactagaaatttgggtcatttatatttgcacaaattgtacaagaaattatgataaatgaaaatatacttagcaaattttattttgctccgtgatatgtttttaaaagaacaaaatgttgtttttgtcaacgaacttacctgtttttaacaattataacagctactaactattcatgacaatggattatttcaagcttgacaattataacgtatccttttccaatgccggaagtccacgctggcatcataactgattatgattgttgaggtagcaatctcaaacactaagttgacgtgtttatttttattacaattattgacacgtggattcaaagaggcagagtgattaaaatgttttcaatcaaagattgaaataagtgtttgttatcttaggagaaccctatatctgaatctagcaaaggaaaaagaagaaatggaaggaaggaagacactattgaatttaaagtaatagattcaaaggacattattgaatttgaattgtacaaatctggggttttatgtcttgatttggggaagaatactatagaagggtttgcaaagtcatgtgaggagcacatgcaattacagaaaggatactcaaccagccaacgtggatttccgccatcaggaaaatgaaacgttgttataatcctcaaacttaaaatagtccattgtcatgaatagttagtagctgtatatttgtcaaaaactggtaaattcattgtcaaaaacaacatttttttctttttaaaaagataaaggtctgttttaactcatggtcgaacacttgtgttgaaaagcatctgacaccttcttttcctaattcagttttacactgtttcagtttgttttccatctactaactcaaatgctttcccaaattcctccgaattcagatcgctttttgaataaatttccgcctcttcttaatgaatctgatgtgatttcagttagaatattgcaatttttttcttttctcgtttctagaaactagatatggtggttagtagataaaacgatttatagatcttgcaagagtatttctgaacatttggagaaaacaattagaaaatttgctcttctaagaacactgaagatgatgtgtaaagatttgacgaatcttcgttattgagatcctatagtttgaagattggggagatcaggcatctgtgaacactagatctatgtgcaaaagtgtaatcaaggtcttatgttttaattatttttaagatgaatgattttggaagatatcagccgatattgtccaaaggggtcttggttctcgacttcgataaactgatatttatcaagattttgtactggggtcataactacatggagacatggagtgctataatttgcaaacaaggacaagactattttccgggtgaaaggaaggagtttttacaggtgtaggaactaacttttttttttcttttctaagccttggttctggaaatattcttacacaagagaactatatgtttccgagattctgctcgtaaaatatttttaatggagcaaaacaaaattgtgaagtttatgagagtagccagtaatcttttgggatggcatcttgggttggaattgtttggtaactggagtttaattaacggtctgtgaattgcagaagttgacaaattttttagtaaatcagctatttaattaattgtttatcagatcgctgccatagtgtttctttctagaataaaggtcctggagcattatctttcttccaagagaagttgatggaggataaccagatttatatcaaggaagattggttttggaagtagggtatagaagtggatgaaagtataagtctgacgtttacttacggtaaattgcagttctatttgcagtctaaaagacggttggagggcctggcactaaaaattgtgcagaatctgaaaatatccttcttgacaggtgcctttgaaggtatggtgaaacaggaagctagttaagtaactctctcaattactactatattaacagagataagtgctgacagatccctacctatcctaggtgtcacctgttttaaagagaatccaaaaaagtgctccatcatcatatatttttaattaggaaatgaaattccttgttagcatattactattatagcttaaaaagaatttgaaggcaataaaaatctttatttagcttttcaattaggagatcaaaaccaagaccgtttttaccccatttgtaacactccaaatgaatggaaatactggtatcagttcactgtaaaagatcgattccatcttgtttggttgttacgggttgcaaatgaattatgaaggcgaatcgcgatacgagcattctgatctggatcctattctgggaacattttgcaaatggtattatctcccagcgtctcttgttggttctttcagatttaatatctgaaaagtgaaaactttgtttattcggacatggatcaagttatatatgtattcataactatgttaaatttattgttttaatatattttttactttcaggatcatttatatgcttctaactttaaaattgttgatttgtgcagtccaaa

SEQ ID NO: 14111 - DNA, 3033 bp, Aquilegia coerulea
  Intron number 1 from transcript AcoGoldSmith_v1.009074m (l ocus AcoGoldSmith_v1.009074m.g) derived from phytozome v7. 0 (chr-ID scaffold_16; pos 3110576 to 3113608 reverse stra nd)
cttgttatctcagaagaaagatattcaaaggttagtttaatagttttattttaatttggtttaaatttgaattattttttgcaatttgtttgagacgtagggttttgttttttaatgggaattggggtttgttgattattagaatattaaatcagttgcaattaaggtttgttgattgtaatttgatagattatgattaattttgcattattatgatagtttcttagctgttttcttaattaggtttagatgaaattagagggtagattttccggaaaattgggggttgaatctgatttcatgccaaatatcaattgtaccttgctatagattttccgaaaaattgggttccctaaggtgaaaacttttgtttggttcgttttgtgccaaattcgtttcggtagttgtatgtgtcatttaaattaaatttcttacatagggattggagacacgagtttggaatgatccacaattatatttcaaacatttgtttaaagtagagttgcaatgcacatcacagtaaaaaaggttattttttcgttaagaatgaagtacagtataaagacagaaataaatgtcgtcaaagtgtgtgtgtgtgtgtattataacagagagtccagatacaggtagagaatagagatatcccattggtatgttaggtttctgtctcgttggaacttggaagtcgacttgagttttgaatattgtacagttctatgtcatacatttgttaagatagggttagaatataaatcagagtaaaaatcctttattctcattcgaaacgatgtgtatgtcatacatgtacagatgtttcgttggaaattggaagtcgacacttagaggatggcggataccatcattgttcatggcatgataatttcaataaaagtaatatgaaaagtctgagtctccattcaaaaataatttaatgaagaaaacaattgagcgtttctgtgtttgacatgtcctaaacaggattttaccctttttgaggtaccacagtctcatcattagccacgtagatgcaataatgaaatatgttggggtaatccacgtttggatgatatggtgattctttatttataaagttgttatccatcatgaagaagatgatactttctgttttcataaagaatgagaaacacgggaagattttgggcattgtatgcttctgatatattcttgggttttttaacttgtaagaattttttttttgattgacaagcgaggttgaggggacccctaccccttttaaattgcgtggggaaacttatatcaacaatcagccgttgacgtgtttcgaacccacaacctctccactttgtgagaggggtgctacggttgagccacaggctcattcacaacttttaagaattttacctcaagctaatgcagaaaaacacctgaataaacctttaagtagggcaaataagtggctgtttgaagagttagacactttttaatggtgtcttgttggtgaaatgtgcaacttagaattcaattcaaagtcatgtccaatcatgacttctgagtttcaactcaagagtcgagagacctgtagtgggatgatgcctcttagaattttttagaagaaaatctcctatgatgcctttccctgtgacagagctctaaggatgcaaaaagggcttactagtggactagaaaaaacccttagaaaaaggggggaattacacaggtgggtcattttcctgtggggcatgctctctggaatttgtttccaaagaaagtaataaaaaattggaatcttttgctgattgattttttgaggagaataagaattccagagtaactaaatctgtttttcaattcttgattgttgccctactctcagaaactgtttacattgctcaaaccgcctagctcagcgtggtgagagagagtaccaaggcctgctgttggtttgggttttctatcccactgaaatgcaagcctgcaactgtaatcactggaaatgattgtttttatagaaaatcgtagtcaaatatcctctaaaatttatcttagttcatgccaaatttcttatattggaaggaactcagctggtcagtctatggctaagctgaaatgcctatctacaaaagatgcatcaccttggaatcacataatctcatacgaaggttaactcaaaaatatgtcattttaatttctcatttgtctctaggattgatcattcggttgtgattgtgtatatttgttactgtatgagtttaaacaattataatccaacatgtatgactttaaccatgtctaattgacgtgtaggaatattgtaggttgtgaaaatccttcagattcttgtctttgtacagtattttaattgcatttaagaagttgaagagaaactgttgatcacagttacaatttgtggaagttctaaatgtttagtacattttataacacaaacctgtgtgcatcttttgcggacattaaacgccggacttttgttgtgttttcatcagatgctttagaaatattctatgatggtagtaactttataaacccagtctaataattagatccggcttgtatatatttaaccattgatgtttaggaatattcagtcttgtgaaagtcctttagattctagtcattgtacttcaattgcattgaataaattgcacagaaactgttctgaagtgatgaaggtcacagttgcaattgtggaatttgtcataaatgtttagtacattttccagacatcaaatgctgaacttgattggtttttcagcagatgaaatgtaattcttgatacacacttatggtagtttttctttcacctagtatcagaggctgtaggaatattctaggattgtggtaacctcataaagtcagtcgaagatgattctaatatagaagcctgtaaagattaatgtgtttaaacaattgtgtagtaccaaaactagaagtagaatatttgaatttgatgctatccatttaattcttttgattactgtgtttgtttgagttatcactaaattattcaatacctttgcaggaagcaagctgctc

SEQ ID NO: 14112 - DNA, 2865 bp, Aquilegia coerulea
  Intron number 1 from transcript AcoGoldSmith_v1.019630m (l ocus AcoGoldSmith_v1.019630m.g) derived from phytozome v7. 0 (chr-ID scaffold_6; pos 8515971 to 8518835)
tgtttggagctgaagctttggttatcagcaaagtacacccaaagtgcaatgcttatcaaaatgatgcagaacaagccagttcctgtgagtacttttagatagatacgtactccactaatccagtccacaccttttctgtctatgatcaacaacatttgtgatgattatgaaagttgagacgccattttagatagatatattctctacgaacatacagtacatggttttaccagttgcaacaaagccttgcctctgtgtaaagatcatgtttcagactgctaatccaaaatgttaaagacataattatgtaatcaaaaccttgcccctgtgtaagatcatgtttcagtctgctaattcaaaatttaattttcttttagtgcaacattatgagcctctaacacactatgaattttagacaataaataagggtctgtttgatttgggcaggaaaacaatttaccagaaaatagatttacgatatgcaaatattcgggaaataatttatttataaaatgactataggtctatagtactatatatattgatcacaaaaatcattggaaaatcgtgtaaatatgtttctattgagagttcatcgagctctaatatgtcccaacatattgtctaatcatttcatttcaaaaatttaccccttattttccatgtaatcaaaacatgggaaattgagatttcctggactcgaatcagacagaccctaaatggagtactgtcaacattaagtaccaacatacaaacaagtttccagttgcaacaaaaaaacatccaagtgaagtttctagttacagatgcaaaacatagaaatagtagtagcacacatttaatttgcctacaaacattatagataaacatagtaccaaagtcataccatcactatatttctcataaccatgataaaattttgtgtcaaaactctaataaataaggtttctcttatgttaatcattatgtttttcacatcaaaagttgtcaatgattatgagaaatattacaaactgtagctagaagacttaattattcaatggtgataggagcagctgaagtgttaccataacacttctggaagagttctggtggtaaatcaccatccagaatttgtactttgaacttgataagcttggtgctccactccataagctcaaaaacacaaccatctcctactttgagcatgttgtctgtcacaaagatcctccaaccagtcacgtcaaaccgtttattactattccccatgtaattcgtcatccagtttctgtttcggcaggcaagaaccactggaaccgtagcttcaggtaataaacgattaattttcactggaagcacctgcaaacaattaaagtcagactcagccaagtttcttatacatttatattatctttttaaacatataactaaaatcttacagaatttaccagttgataaggatttccaacatgatatttagccataatgaagagcatgtatggtttatcctccaggggctgatgttcatcgcagtcgaaactctgagaatgtttctgtttcatcttccctgccaaaagattaaaaaaaaaaaatgaactaagatgagtctaccatttaatcttgagtattttacctagcatctaataaagaatgtagaacaaaacattgctgcaaacacctttgcctttatcagtgtaaccatgaatgctacgtcgtgccaaaaattccatctacatacaaaacatgataaagttcaaacttgtgagcaaagagtattggaaacttgattaccacaatctttacttgaaggacaaactctaagaaaacatatataagtcagaaaagagtgagttagatacctgaaaaggagagttgggtacttctagacttttagcttggaggaaggttggaatggaggttgaagaaactggtgagttctaagttttcctgaaggcttgattataaaagagaagtgaagagatgaatggagaagtacaatgtagtactagtaggtagtgtttgaattcagctagtaattacccaatatcctcatttggtaacctgggaagaaagcttatgtagctcttgaagtcttttgtgcaactaactatttaataggtgttgttactttgtaagcaaacaccatcaagactctttaagtctttgcagacttgaattgaatatcttgccatgtaaaagaataagaggaatcactttaatatcaagattttgaaatcagaagttgagaagatgtttttattcttattcttgaaagggagtataatagtgatgaaagaaaaaaaataatatgaatttcaaaagtttaaggctttcagctgcaccattttcagcaaccagagccacatcacatcccctttcaaaggctccttaatttccatcacatattagttatggtactgttagtttcagacatgaaaaacataattttgtcgaaatgaagatatagagaactgcagcaagaaatttgtcatatatgtccatatttgcatccatggaccatggttttatatattaatatatacacgttttgatctacattatttgtcctccactccaattaacaattaatcgacactcataagggaaatcgtgcattaagaaagtaaatttatatcaataacaaattattgctgtcatgaagatttatcaacatcattgccagggttgtgttgggcaaggtttgatgacataaacacatggcacagcttctttttgtttgtgttatcacagcttatttcaaataactgaacgttcagtttgttcgcgttcaaccatgttcaagataactacttggaagttcactaacacctgagtcagtttcagaaaatgactcatgtgtgtttggagctgaatctggatttctct

SEQ ID NO: 14113 - DNA, 2019 bp, Aquilegia coerulea
  Intron number 1 from transcript AcoGoldSmith_v1.023944m (l ocus AcoGoldSmith_v1.023944m.g) derived from phytozome v7. 0 (chr-ID scaffold_7; pos 4660135 to 4662153)
ttggtcttaactttggtgctcctctccattacaaggtacttttgtttctctcgttgaataaatgaccttctaatacccttgttgtttgtgaaatatctttgtttgattttatttcaatcttttgattagtgatgaattccaatttgttagggatagtaaaggaaaatctgttaataagtaacaaaacaaaacaactattaggcattataaaggagaattatacaaagtgagaatgcgcaagaataaagccagagacaataacataatgggctggttttactgtatgagcactgatacccagttcaccaataagtcgaacaagttattgtcttcgtttgcacggtttccctccaaattagttccatagatgtttcttttgattcttcagaattgttgaatactttggtacaactgccattaataccttactttttggagtattattgattgtccataagatcgcatttggtaggaaggcacataattttgttcaccaaccgagttccattgcttctttgcaacctttccaatgccattttgatgggttacccctctgcaacaggtcagcaatttttattttctcctccaatagagtgtactgtacctgtgtagtgaagctacagtgtaagaacgcacggaatttagatttgggttttattaagcaaagtgcgcggatactctatacaaagaatttgatttcttttaaggtagcttgcggatcgaaaccagattccaagaaaacctgtgaaacatagagtgcatagtaacatttgaagccctctaatgaaaatatgacttaaccataaatatgctctttcttgagacttgagagcttccaccacctggtgtgttctctatcgtggataacttggttatgtaatattatgtcaaagttctttttgtactttgagacaatttaatacatgataaaaaaggaaaacagaacaaggctgcggggtaatatatccagcaatttgtcctaccggtgttttgcctgcaataggcaaagtggttacatgcctagaataagtgaatatttacctgcaaagtggttacttgcctagaatatgtaaatatctttttccaagtgtaagaataagtgaacaactcaatcagacttgtagttaactatgaatacatagttaaagtaacatagacatgtgtcgtaggatgggcacttcctaaaatctgagggccgtcaaattcattgtctaattttatttatttttaaataaattactggtttttaatggtgtgtaatctgagggtgagcacttgctaacattcgccctcaccaaacttcaccactggcctctgcccacttatagaccacagacctccggttttcatttatttatttatagtttttaattatttattccattttcattctatagccactttctgcttctagaatctagacgccccggtagcatgtttcttagtcttgaggccttgggccctcggcccctatcaatccctaccttcagccaggagtgtataaaatttcaagggttttaaattagcatcaatctccaaaagaaggtttgtaattcaataagatataaaaaatgattaatatttgaaattgagggaagagaaaataaatacggaatagacaacaactacaaccatgagttttattatctaggctatatcttccactgctatcattctttcgtatattttcttgtaatctcctttcacccgctatccttatgaattacatttttcgtgtattcttttttcacccataagccttatcatgctttattttgataagtccactgttgaatccgcaaagcataaattcataaagttgcaacttgatttttggtagcataacttgatgttcttaaattattttctggctgcatcacttaatttatatgaatttctgtcagctgttgcttattgacgcatttgtctgtattatctggtatatgcctttcatgttcagtttactcataaatattcatgtcagggtgtccgtttccatcggatcatcaaagggtttat

SEQ ID NO: 14114 - DNA, 2036 bp, Aquilegia coerulea
  Intron number 9 from transcript AcoGoldSmith_v1.004173m (l ocus AcoGoldSmith_v1.004173m.g) derived from phytozome v7. 0 (chr-ID scaffold_111; pos 328429 to 330464 reverse stran d)
cattacgtgaggtatgatcacttattagttcgtatacttttaagtgcaacatcctctcatttattaaattgggagaatttctgatcctgtcttattatatcatagggaaatccaataataaactactagacatatacatttttcctttcctttcttaagaaatagaatatttaaagttttgcatgattgcatgaatacagtttatgcaaatgagactttaatatctgaggtggtgatgcacatttgcacactttttttctaccttctgttaaagatattttaagaaaagcaaaacgtaatgtctgacactacatctccccttcactttttaatgatttagaaagagagaatggtatttcttcacttcacttttttgcatctctcttctgcaactgtgacaagatgagggtatgaaatccttctcatctccctgttttgtttgctctcatttcatattttgtttttgtagtcttaaaccctaaggtatctgacttacatattcaagaaggattcttttgcaaatatgtagagagggagggagagactatgtgatcatgtgattaaccgagctctttatcgttatctggttccctcttgcgtccatcagcttaaaagaaacaaaataatgttttgaatggttctccttacccatgactcacatctcttgattaggatattgcagatatgaatctttggtggaagcttcaataattataatgctattgagtatttaccaatcaatcaatggatttgcaaaagataacatgaaagttggctgcagggtttggttgttaaatcttaattaaaaatgaggattacaactctaatacatgattattatctttgttaaattaaccatcaagtccccctactctattaaaatagtccttagctataaaccctacatggactacaagtagcttttcaaaaatgaattagaaataaataacaatcttcgaagcagaatcaggcctatgacataaataaaactataattacaggcaggggtttcctgcagtgcttaagcagcacattacatcacatatttacattcactcgaagtaaaataatttccattcggaagttactccaatgtttatcttgtcaaaataatttcaggggttattaaaaatcatatattaaaatgaaaagtcattgtctttgttatggtgggctgtatgaatttgattgcagagtatcgttcatgctaattataatcatgtacttacacaccatgtaacgcatatcaaaatcttgagttgtgagggcatgattcaggcgtattctggagaaggatgctagttatgagagttcactcttttttattcatagaaactagaggaatttgattaaatttgttaataaaattcttacagcagagacaaaagtcttcctattgtgttttcctgcaatgttatattaaatggttaatatcttcttcctcgtaaagttgtaatcattgcggtagccctgaaggccttttggggatgccaaccagtctgctgctttgtatgaactcatgtttgatgctataaccttccatgtcctgtagctgctcccttaaatcttcagggtaggttctcctgcttgttataatccatcactctgtgaatgctaatgctacagtaatgatattggacttctttggatattgagaggagggtatctaatttgttgaagttatatgtgattggttattgtaaagagaatagtacaatccccattttcctttttctctgtttgtacatagtcttgggtgagatcttctcccacctcctctttctaattcagaataataagatgccagattattctccgtattttagtttttattatctttttgtggttttgcttcagtcgcatgtatagtacaggcattaacgggttttctgcatccattattgggattttagcaaaaaacgtgcatgagattcgttaatgctttctttctatagataatgattaaaagctgtttaatgcaaacctatttcttttctttaggtctctgctgcccgagaagaagtgcctggtaggcg

SEQ ID NO: 14115 - DNA, 915 bp, Aquilegia coerulea
  Intron number 2 from transcript AcoGoldSmith_v1.009406m (l ocus AcoGoldSmith_v1.009406m.g) derived from phytozome v7. 0 (chr-ID scaffold_15; pos 582898 to 583812 reverse strand )
gaggagctaaagtcgttcctataacacttgatcaagtaagtttatggttgtaacatatataaccaaaggcttcgagtcaaataagctagatttttttttagaccaactacaatgtatagtcatttaaacaaattgtgttctttatacgatgaatgatatggagtagagttaattgagtactgtatgttgaaatgtttatgtacttgaatcaataaaagaaaggaactcgtagatttttaataaatgaagttgtgtaatgtgttaatcgttatacaactataatcaatcacacattcctctgcatttaaagggatttagtttctttagaattcattataaggggatttgttttcatgaactctattttgattggcaatctatgaagttatatacttagatcttctgagggccttgccaaggatctttaaccatgttcagttgcggccagcaagctcttgtcctgtaaggattctgagtggacctacaaggctgagtactgatatagtaactgcgtcaaaatgctggtttcttgtcttggctaaagacaaagtactgcaatggggtggaatggaaactgataactggactattgggtgccaacctagttgagatgtgttatatatcatataaattcctggagaccccttcttgatatatgtttgcattatgacaattagcatgaatatagttttactcataggaaatgatgattaaattagatggcatcagtaagaccatatatattctgggaaataaactgttgagtgtgaaagaacataagaccgattcctctgttgcgataaattctttgaattcttatctatacaatataagtttgtttcctgtatttttgtcagctttccttatattaatcttgttatttctttctttgttgatccatatatataggtttac

SEQ ID NO: 14116 - DNA, 3233 bp, Aquilegia coerulea
  Intron number 2 from transcript AcoGoldSmith_v1.010605m (l ocus AcoGoldSmith_v1.010605m.g) derived from phytozome v7. 0 (chr-ID scaffold_13; pos 1511364 to 1514596 reverse stra nd)
tatttttttgcagattgctgccttgcattgtggtggtgagtgctttataaactgtgtgtttgttactgatttttgtttttttctcctaatttggtgcttaatctttgatttactgattgattgataaactgattttgaagatctagggtttattgaatatgttgactttgtgttgacttcgagattgttcagttgtatgtgtaatgtagatgatttaaagtttatatttgttgaatcttcatgtggaaacttactaaatggaattgaaattggactttcatagttgttaagggattctgtgtatattatgatgctttcttgtttccttagacctttatcctccctactgtgatggtttttctcaagatgaattgctatttggtttgggatttttgccttttggaaacttctcagctgtctgaatccgttgacagtttattttgtactttttgtgaacacaaagaaccagttatatagttttttcctaagctttgttagcttaagtttgaatagtatcacattattcattgtctctgagtctgtggtcaaggtagtggtcgaatttttcagtgtaacacttaacctgaattgtcaataaattaaccatcagaggctgacgcacaaactagggatccactttcataagtacagaataggagatgtaaaccataatcaaggatgggtttccgggttttaaatttgataatacaagttttcttggccaacataaggaacttcaattgttttattgtttattagagcctgaagctggttattttatcagtatgtgaagaacagctgctgacctgcaatgtataaaacaatgctaggatgatattaataaataaatctagaagatcataaatattcattgttcagagatatatagtactacatatttgctgaagcaaaatgtattggaggcgtaaggacaacaccttcctaaatcctacagtcattattttgatagaacatataggtgtgccatggttcttatcagttggttttactttgaaatctccgtctcagagtggagcttgcagattttccatgaattttggataacaataagataaacttagcagtttataattgttagcttttcattcaagattttggcacttaataaatcttccattgtgataaaggagtttatcaaggtggtcactaaagatagttgggccactatgtgatctttcttgatcgcgtatctgcagtctatttaactttaataagttaaatttttttttttttatccagatgatacaattgtacattggatattcgaggatctgataatgatcaataaaattgggttgttatgttatctaaatgtaattgagtgcattgtgttatttatcgaagcatctaactctatagctcgaattaggctttaggaactatttctgattcttaactttaaaatcagaagataatcagaggaatgctgcctttttagtcatgtctagattatttgatgtttggggtttttgtgtaaatggcttcattattgtataaaaggcagataggagcttagctatgagggcctttgactgaggtagctaagtttagctgaatgacccaatatagcaatgcagaatgttgcaagtatttatgatcctatcttatctagtttcaatcctcaaataaaataagctacagctacaggcatcccttaggatctgaatggaagctattcagcagagttctatgggctttccttgcttgaatatatcaaacattgccccaacggagaagatggaggactccattcttccgtccatacattcaagcgtcttcaagttagattgaggttccttgcggaagtcataagagtgatagccgacaatgcacaagctatggaagtgcaatagttcaggttcttattggaaaaaacaagtgtgagttgttactgatgaatctttgacccacagattcttcatcttaaagttggattatatattatgaccgttttaagactatattcatgctccttgtggaatcaagacccacaatatattctgtagtcaatagtgttatctagtggtattagggtcgatatccaatatagtctttgagattgagccaaattctgagaagggctggtctcaaatagcaacaagaaagatgttggtcactgtttctactaaaaagattcttagcattaaagttgagaattaggcgtacatgccaactagagatgagtacatggatagaccatagtttttttcgtggtacacagtggtacaaatactattgtatgatatcattttggtcgttaaaaacactagatgtaaagctacgttcctagacatgtagtaatatcttcaaagggaataattagaatgattgtatgattctactcattctagacatctaagctgacattttatgaacgttatgagttaaatgttttgtttttgtgtgtatgatgtgtctgtttctcttagaaattagaatacactatgcggtagacatagagtccgaagaccaactggatgacattttcatgaatcccgttgtctcagtgtgtatttataactatctggtttatgctgggtagttatgacttgtatactccagtttaagggatgagtattgaagttttgtaattactttattgatctatggttcactgttattagaaacttttgcgtgtaatactatgtcgggtttagttagtggatcctttactttatgtgattgatacacattcaacctaattataaaggagagcatagccaggagactaaggtttttcctctattcccatcatctgaaacttttagtagatatggtgacacaaacacaagtgtgttttgaaaatcaaaatgtgcataaatcaaatattgtcttagtgaaatatgtttcttgtttccaatgcattgatatggtgctttctgccataacacaagctattgattttggaattgtggtcgttgtaatatattgaagcaagttttttaatagagaattttgtttagttgtatctccttttgtttcaatccaattttactacgtgatcaatgaaaactatcctccatttgtattacttagctggaaagatgctgatcttgtacccaataaaagattacaactaaacatattttggttttattctctgatcacatgaaatatatgctactgaaccaatatgttttgtcttgcaaacctgatatattctctgtttcattgcagtgcaccttgtgtatcatacctgcttcgaaaacgag

SEQ ID NO: 14117 - DNA, 2002 bp, Aquilegia coerulea
  Intron number 2 from transcript AcoGoldSmith_v1.000078m (l ocus AcoGoldSmith_v1.000078m.g) derived from phytozome v7. 0 (chr-ID scaffold_87; pos 31629 to 33630 reverse strand)
tcgatcctctgtacgttctcgctttacgtcagctggtaagatactttcatctactttctctttataatatttttttattagaactgcattttgtgcaattctgtcaatttatggttctcttaaattgattgagaaaaatgaccactcgctaccttaaaactcaaaagagaaaaatataagtttttctagctggtcagatactttcatctactttctgtgtttggcaatttggagctacattttgcataattccgtaatgattcctttgtcaatcgatgcttgttcttgtatgttgattaaaaaaatatgtactcactacaccagaaaataaagaagaaaaacataattctcttttttttcttggggtttcttgagatttaagtttcacatgtttttaatgtttcagttatcagtagctttaagaacgtattctctgcaagaaaagatatacatgttgaagtgattacgtagttgtttgatttatggaaaaaaaaaagggaaagaatttggttgttgtggccatcaataaggttcactggaaatgttgatccacccatattttcctatattgttcttttagggtttagggttttctaaagtagtctaactggattgatccgtgattcaagccaatccgaccatttgatgataatattagttcgaatgttggactggttgtttgattgttggtgttcaatggttgaggttctatggaaatgcttgtgtctttctgaagagatgggaaagccagagccgtcctgattagtagacagttgagttgcttgcctaagcctcccaaaaactcatggtggttgacacatgtctacctcaatgtactaagaaggcttcacgcaaggaaaagtttatcatgtgactagggcaaaataggataaatctttggtgctatttgtgctgaactggttctgttggtaggtttttgagttattagaagttccagttttttacatgtaatcttttgaagtatcctgctatcctagtgttgtagcaccataaattgaattgggtttataagttttttgatgtgaaatattacatcactacgcattagtggttttaattaaattttagtggtgtaagattctcgtgtttgtgtactgaaggttccattatatttagaaagcgaagtaagcgtgtcttgtggaaatgtggtattgatttataaatgtccaaattgcaaaaaatgctatatggtcctgtggacattccttgctagactatttaagtgtttctcgacaatatctgacatctgaggttcaatgcactgactgcatggcaatccacaaaagaaatgtaaagggttgatttcgatgtttatcattgcaaagctatttatcttcatcattaggttgcagtatacgaaatatcttttttattttttgggtggaatctggtgttctttttaatcatttcttatctgtgtatctcttaagaagtaatccgccgtgaaaagtagattttgtatgggcagttgacagacttaattattatataattacatgcacatgggaggtttttggatgcatattctgagaagaattaaaacctttaagcaatttgtgggtatacttttttttttttttttttttttttttttttgaaatcgaaaattttttttttttattatagaataataagcataatatggtaactagtatttttgggtcaataattgtaacttggtagttcctataattgctgtaaatagcaacttttaatgtatagatattgtagaaattttagtctaggtgaacttgatacattttatacctgagttaatggtattgatccttcaccatgtgttacgcttgattctagtgcaaatgaaatgatttaattgttttgattgtttttctattcgaatgctttatattatagataaattgatgaatgtgaagtttttgatttatcatcttccaatctcattttaattgtcctgtgtactgcagcaggtagtttgactctggtacccacctctgaaatt

SEQ ID NO: 14118 - DNA, 511 bp, Aquilegia coerulea
  Intron number 1 from transcript AcoGoldSmith_v1.004959m (l ocus AcoGoldSmith_v1.004958m.g) derived from phytozome v7. 0 (chr-ID scaffold_10; pos 346752 to 347262)
acactctcaatcaatatcttctcttgtgctagcaggtaagaagatgattgaaactattcaactgattgaattacttagtttaatttttatttttttatcattttctcatgtttttaaactgagcaaagataaaaatttgacatttttcatgatttctatatctaatagtgctgtataatttcgaattatagaatgaaatatctctacttttggtagttttgatttgtggggtttgataattttttgtttatacatacatattgtttgattaattgcctcaaagatattaaaaaaaataaaaataaaaataaattgttttgtgtacatttgtgaatttatatggttatgagatatcgttgcaatgtgggttaagctcaatacagtgttaaaatagtcgctttatcgttaccaatcaagaatgcgtacattttattagtgcatatgcttaaattcaagtagtaattctgcttattttttcatttgtttaggaaaggattgttattgcatagaa

SEQ ID NO: 14119 - DNA, 1677 bp, Aquilegia coerulea
  Intron number 3 from transcript AcoGoldSmith_v1.009752m (l ocus AcoGoldSmith_v1.009752m.g) derived from phytozome v7. 0 (chr-ID scaffold_11; pos 3324593 to 3326269 reverse stra nd)
ggaggatatatctgtatgtgctttattctgttttatttttccttgtaaaggttgtagctttgttatttttgttagtactgtagacattgtgcttgatttaaaccatattaacgcaaatatgttgcttttgaatgaaattaagtgttgtcatgttatgatataatttggtgctagcatgtttagttaatctcatatctgataatgaatttgagagtgaatttactttccaagtaacaccaaagcccttgaaacccttgtgtaacaatgtgtgttctaccaatcaagtttttgcgttagagtattttagaataatttttatggggtaacactgtaataacttaaattttaatatattgataagtgtgataagatggcatttcttctcattcaacccttttataactccattgtatagatgcctcgttcaaagatttttttttttttctctgtgtgaggcctttaatctcatttgtttatagaggtctcttcagtcaccttcttataaacttcatggtaatctgtggtcactagcaatacacacaaattcaatatgggaattggcagaacttatgaataagaattgaaagggttaaagtattgtcaagtgaatgctatcaggagtagggattacccagatttaactatttcctgaattggatttgcgcattgtcattgaaaactgtgtagattaggataaggaattttaaatctccctagcccttggttaaattatgttctttatgttatacgtcctttacttgatacttgtcactattaaatatatgcctattccattcatgtgcaaatggtggagaactaatgaatcgcctgttataatctccttatgtgtggagaggtttagattgcatgccttttgggacgagagatgggcatcattttcatattagtattgtatgctttctcactaaagtatgttttacgaactataaagagaataatgcaattacatcataaactcctttgaaatatgttatcatgagtagttatcaaattgtacttttgttggtgccttgatcttaggagtctttatcttttcgaaaagaatagctttgcatcgagtaattatttgatttcattgacttattttaggcttcccttgttgtacgtggttgggttgggtagtctaaagcgaggggaataagatatgggctgggacaaactaacaattattattagccttatttgaagtccagaattcatcatttactatttcaagtggtctgtgatatttgtagatgcagctaaaaattcaaaaatagtttgcagtatttgttaaaacctgtgcattagcctttctgtatttgtgataccgacggaggaactatattggatttccatgtcatcttctcttctatactgataatgttttaattatcacgttttaaaactgatctatagttgtgaaaatagtcataatgattgacacttgtataacactaaaacttaattttggcatctgtggttattatatgacaatcgggcacttgaaacgttcagaatgtcagatgtaaatagttttttttttacttgtgtctattctcggtttagggtatgaggaacctttgttttgtttgtgaagttccatgactagttttaccaaccatacttactgtatttgcagcatcccaatctgttaagaaaattatagagataaat

SEQ ID NO: 14120 - DNA, 2853 bp, Aquilegia coerulea
  Intron number 3 from transcript AcoGoldSmith_v1.002050m (l ocus AcoGoldSmith_v1.002050m.g) derived from phytozome v7. 0 (chr-ID scaffold_5; pos 6128247 to 6131099)
ctgcatctgttttagtgaatacgcaggtaatctattcattgactccattctcataacaataacaattagataaaatgtgaaatttgaaaacaaaacctggttagaatttcttacccagtttatcgagcacattgtcacattcatcgtccatgaatgtttataaacatgcatcctgatttccatagaagtgtctgtatacacaaacatgcacgtatatctttaataccaaatacgcttataccttttaaactttacacttcaaactcttgacattaatgttctcaaatgatactttcatttttaagccaaaatgtacaactaatatgctttgttttttggctatatcctagaatcttgcctatattgtatttagtcaacgatgccagatatccatctgcttatctaggactaaacaactggagttcattttcatagtcttcagtcttcactgattacatctttttaatattccaaaaacctattacttgttgcttatctagtatttccttgacactgatactacacatctagtatagccttttgtagtttgttttctcagaacagggacatcttctcccttgcttttcttgtactaaacttttttgaatatattatgcttatttacctctaaaaaaagatgttactagatcattttatatcacgtttgtttttgtataacacacacaaagatatgtaccatactttagcttagtgcttgactgatcatcattaatgtgtgcttcataaacattgtcatattgaggttgcaaccactttatcatgacacaatctttagctgatgctgtaggaatataaatcaactaactatagcgtatatggatttttatgtggctaatatttaaaggtattgaacctactggcttgtactagtagattaaatagtttgtcaatcgaatgtaatttcatataatagtgtatcagattgtattgttttctctcgatgtttcatttttacatctctttctttaagtttgccatttactattattttaaaacaagagacaagaatacaagaaaatgggcctccaaaacattaattgattgactttaggaggttcattaagagccgggtgttgctaaccgtgtgtgtccgtcccatttccaatttcgtaccaagttactaaatttatatgccttgtatccttcaaactaatgcctgcttcgtgggagaaataaacatgagattaaatttatataccttagcaagttactaaggggagaatgtggatacccgctatacaaaagcagttgaagatcacatagtatggaagtatttgcactgcacatggaaaggttaattctacagttaagctcctatgggcttgctcatattttctctgtatgtcacatatatcttgttttgcctaaattccctgctgaccgtgtgcgggcatgcggctttaagattcaagctggaattactttcttcgattagcactgttgtgagtcaaaactcgacttcggatatgcctttgcgtgttaatagggaatcaattttcttatctttttgattttttttttctgtgtctgtatgtgctttgttttgtgtgtatataaacgcattattttagaaatacgtgaggtggagtgtggagatactcatattaccagccaccaaaaagaatacactttatcccgacccccagatgagatcctcaaatctcaggctttccatctaacatcatcgatggccataatgtaaagcatttttaacattacacacttggattttccttcaatatgtccaacattgagcatgtacgaacatctttcaaaatagcttgacctgttccagatactttctttcgtgccctctttgcaggagacttgggtcatgcacagcatgaaaacgattacgtttgaagtgacagagaacaaatatctttgctatacttgtccttctgtaaccacttagtttacattggagctttcaacactggaaatgcctggtcagcaacaatagtactcaaactgtacttgagccgaacttgacttgcgagggtttgaaggattaaaatctcaaatgtaaaaaatcacctgaacaatatgccattgcagctggggagagaagcaaagaatcttagaaggaaatagtgatttgcatccataattttcaactttgatactttgctttagagttgggtctctcataaccccattgtcaggggtttaagatttgaaaatattgtttttgatttgggattctgtcggaacattttctgtacttaggttctagttcacagttcacactatattatattattagattcctcttttacccaaaaaaagaaagtaaattacgatatcagctcaacatgtaaggatgactggatgtgagctacacacaatgcatttgtaagacgaaaaatagtgtgacctcgtgtttctattaatatatgtgaaagaaaatgtgtcaactatgcagaatgtgatgaaattttgccgaaagaaaagaatatggagggcattcatccagcataatgcatatagctcatttctttttatatccctttgatattctttgaaatttttattgtccttaattaacataatgcattaatattgcctttgtaactcaatggaccttagagaaaacatattgcttttgaattttgataacatggatagcatttatcttatgattcttgtataagggtttagcaagtgagaaatatgttatggtacttcaataccagtttctaatacccaggcctggtgtatacagagactcgtacgaaatcgaaaagaatgtaaaaaatctcttttatttgactcgaattaatcatttttacctgctactctcttattagggacagaattcgtcagactgcc

SEQ ID NO: 14121 - DNA, 769 bp, Aquilegia coerulea
  Intron number 1 from transcript AcoGoldSmith_v1.009347m (l ocus AcoGoldSmith_v1.009347m.g) derived from phytozome v7. 0 (chr-ID scaffold_7; pos 1852678 to 1853446)
ctctctcatagtagttcctagcgaggttgaagaaagtaaactacaaataacatattaatcttcattttttttatagatgttgaaatttttaattttttagaattgatgtttatattataagtatatatttgtgcacttgttctactttaaattagatacccaaacttttaattgagactgtaatctagcaaggatgccttttgcaaacagaaccttacactgaaagagtgaaagggggttaaatggttaagtagggacaacaataagggtgtttttgagaattgggttttttttgttttgttttgttttggaactaaagttttgttaaattgctaatgattaatgatagttttgatgatgatgatcatgggtattatgtcaaatttatttagttcatttagtggaggtatgattgacaatggacaagttaaccaaaatcagtgtggatgatggaagagtagggggacaagactcgagagaatatgaaaatacaagattagggagaaaagaaccaattcggcaattcttagttttgtgttatcatgttagagttatttgccatgattatatatttggtttttgtataccaattcttgttttttaattgtactcttgtcagttcccttctgaatctgaaattggaaacattatgtaaaattagtctgtatgtagacagtttaatcttgtgcggaaaacttattagcatagattttattcactcttgtaaagttcttgagtcaaaatccttccaggttaagaagcagttatc

SEQ ID NO: 14122 - DNA, 633 bp, Aquilegia coerulea
  Intron number 1 from transcript AcoGoldSmith_v1.025420m (l ocus AcoGoldSmith_v1.025420m.g) derived from phytozome v7. 0 (chr-ID scaffold_102; pos 451780 to 452412 reverse stran d)
ggaaaacatcaattgtcgcaaaagattcatcaaatgtaagtggctaagtgctttcttggtccttactttaattttttctcttcctcattcaaaaatttccatattatggattcatattttggtgatgagcagagaaagaaagtggaatcaaggaattgccatcaatgtcagaggaacgatagaggtgatgttgttgggtgcatgaattgtaagacaagaagatattgcgtcccctgcatacgaaactggtacaatcgtagacattctatgcttttcaatttttataaacccttcaaaagtataattagcaatttgttgttttcttgattgtagttgaacaatgagttttgtagttatcaattgcttgacttacttccgattttccttttttggggagggtgttaataattttctctcaacaggtatccacacatgtcagacatagaaattgcaaacttttgtccagtttgtcgtcacaattgcaattgtaaagcatgcttgcgtaaacatgggaattataaggttcttatttttggtattgctgacatattttaatgtactcatttattctccatctatcctaatgtcatttttcacttcttcatttctcataggagaaaaagtacgcggaag

SEQ ID NO: 14123 - DNA, 1764 bp, Aquilegia coerulea
  Intron number 2 from transcript AcoGoldSmith_v1.008434m (l ocus AcoGoldSmith_v1.008434m.g) derived from phytozome v7. 0 (chr-ID scaffold_15; pos 842557 to 844320)
cacacatttctggtggtcaagtgatagcgaaacaggtagatgtcggcaactcatatttgatggttttgatgttatttattgttaaattggccaactgtgaatgaaaagattatcctgcatatcctgtttgtattcaattcactaagcttttcggtatttgattgagattacttacaaaaatatatctatctatccaaattacaacttctcaaaattctgatggtcatcaaacataattgactttgtactaacacccaaggctaacttccaatctcaaagtaagtagcaacgactttcattttcttctcatgtgatgcttcagaggatacaaagcagaagaaaattctaggaaacgagtcccagaatcctgagatcccaaagttctggaatcttaaatatttttgtaaaggaaccaagaattctgaagaatgcccttttatgttacctaggttaaagggctttctcatcctttaactactttcttttatttgtctgcctttgtgtttcctttaattatcgttcaatattttctgaaagttatgtgtggtgcactactcctataaaacatcaaaaagctttcaccattaagttttcttttcaccatgcatattgctagcttagaactatgttctactgacttctcaggtttcgcctgtgcctttagccccttactcttagagagaaaagtaatttgtggtgttaacttttgtttatagttttcgctctgctgctttcttaggtcgatcctattgttgattgattagtaagaacctcaaccccacagattatgcagggacaattgagtgtgaggagatcttcgacaaattattataggtttacaagttccattgaacaaatcacattggtttctatcctaaatattgtttagtctttatttctggttaggcattgagtaccaagatgagtacaaagtgctcgataaaagaagggaacagaagatatgaaacccacatatacttttattgttggtttctgggtgtgcagatgatcatagttgagacctgagtgtcatgacttggtttggccaagaccaatatctggggacctttcgtccagacagtctattctgcatcttatgctacctgggcccttccaagccattctctgttgaaattgtctacgatgacttactatattttttcttgctgaatgcttagttcataacagttttaatgcactataaataatcacattggtttccatcctaaatattgttttgtctttatgtctggttaggcattgagtaccaagatgagtacaaagtgcttgataaaagaagggaacagaagatatgaaaccaacataacttctatcgttggtttctggttatgcagatgatcatagttgagacttgagtgtcatgattttgtttggccaagaccaatatctggggaacttttgtccaccttatctattctgcatcttatgctacctgggcccttccaagtcattttctatagaaattttttcgttgacttactattttttttttttttgctgaatgcttagttcataatagttttaatgcactataaataaggagcattatttgattatatatttttgtagcttgcaagttcataggttatatgggtcaatcgagtcgaaaaatatttgcttaggcagaattgcactgggtgtcctaggatgccttatttacaccaaattttgttatcttaagtcagctcttcttcttggatttgaataggtttcagagaagcttttggaagggagagagctgga

SEQ ID NO: 14124 - DNA, 1078 bp, Aquilegia coerulea
  Intron number 1 from transcript AcoGoldSmith_v1.017276m (l ocus AcoGoldSmith_v1.017276m.g) derived from phytozome v7. 0 (chr-ID scaffold_16; pos 2030791 to 2031868 reverse stra nd)
acaacacagtttgttctgttttcacacgaccattggtaagcaaatctatttgttctggtccatatttatacagcctttgtcagtgatgtcgtctaaaatcattcttaccctttgctatatagcacaagtttgttttctttttctttcttttataatggtagcttttactgttgttcagaagacattaaaatggcagtgactcctgatttggggcttggatttagtgaagacctataggacatctgactagcagtcagccatcctaatctttgtaatcctccctcctatcctctcacatccaacacacgaaataatgcacttataccagttgtttttagctcataatttttttattcaaagtgttatactagtttgtggagtagattgcttatgaatatagggttatcgtcgggtctggctctgtttgtgtgaaattctttttagtattgtcgctggatctggctctgttgcctgaaaatcttttttctacagggaagctgttttttgtgcctttttttggaagtaggcaaacagaaatatgtttttctttttcgtgtagtagcaaggcctatttttgggtgtgtgcttcataaacctgatgaagggtatttgatttgatgaagaccccatgtatttttatgaacactggtccaatgagctaatctagatcggcacacttgagccccttcatcctttgctcttccacctcttacaaacgtgcagcctttagcaaggcactaatgatgccttagttggacctcttagcatccagtttcaagattatagaatcccattcaactatgaagttaaggttaggttctgcctagtctaacggaccaccataataactgttgtctgttggcatcaagccgctccatccaacagttttaaaagtcaaatttgctatggtgttccattttctcttagtaaatctggttgacttatgtttgtacaagcaggaagtttagttgtatgatggtatgtaatatctatctagtaatctgcagggttccaaattctttcggaagtaataataaaatgtttttttttcaggatccacaagtcatagctggttccc

SEQ ID NO: 14125 - DNA, 2219 bp, Aquilegia coerulea
  Intron number 3 from transcript AcoGoldSmith_v1.006238m (l ocus AcoGoldSmith_v1.006238m.g) derived from phytozome v7. 0 (chr-ID scaffold_7; pos 6188075 to 6190293)
tgtggcgtgtgaaaggaatcattcaggtaaatttcttctttcaattgattttcaagtttgtacatttcactttgaatgtcttagttatctcgtggtggctaacgtatatctaatgctgtattaattgtgttagcagtagattcagtttaacgtacacacaaattcttacaaacttttcctttgtatgtatagcaaaacctgactgtggtagggacccatttggagattatatttcaaaaaatcttgtcttttgatgtttagtcatttctactagatttgtatatcgtagagtatacatggcacaaattatgcatacaatcctatactcctatctagtagtcagcccttttacatcagtagcatgtaataattaaggaactcctctttgaatatgaaaacacaatcctccatggccagaactttttcttaaaaaagataaagaaaaatgtacgtgcatggtgggctgcgtcatccctacacggccacacctcgccatgcatagctcctaatttgctgaaaaggtggggagggtagcactagtttctcaatcggagagaaggaagggtaagatgggaaggtggctagtaaattgctgaaagggtgtaaaagggttacaagtggtagagagattagcactgcttcaaagtcatcaaagttggtcgtaggagtttaattttgtggatgattgtctgtttaaaaaggacaattgatgatttttttttctttggctgtgtttgtttaccgggaaatctggcggaaatcaaatccacgtcagattttcccggtttatttccttttacaggtgcttggtgcttggttgggtatcagaatttgtagggcccacaaaaaagttttgcaaaacaacaaaccatgtcagatttttgcacgggtatgagattacgagaattctttgcaaactcgtggtccccattgtctctctgtcctctctctctcctctttcttctaaacccgtggtccccctcttttctctgtctccacgtgtctgttcctgttttaattacagtgcttaaccaagcactcaatactaaaataaatggaaacttttagaaaactttttttaagtaattttttacacctactaattagataatttttccaagcaaacaagcacagcctttgattttacatcataaaaccatataaggtcccagttgcaaagtggaagaatctgtagaaactactagataactctttcaccgtgtccctgtcatgctaatcaaatcgtctttcatcacttttgaaacatctgtggatatgtacgagaccgcattatattctccacactatcaacctcgttatattccccacttctttcacctcattctgaggtgaccctaagctgatgaacgagagaatatacgggaatttgcatggaaatgaaatatgaccgttgtctatgcctctataggaaagtttttttatataagacgttggttgattcgcaatgtgccaaaaaacccatatctgttgctttatgtttgcagagggacgccagaaatgtttctccagaatagaacctgtgatttgagttgggtactagaaacaatatttttatttgaaaatgacttacacacaacagaaaccaaaagatatgtaaccttatgtcacaacgaattgtatgggagtctcctcttgtagcattgtctgcattgcaacaaaaagcaacgagcaagatgattcatgtactgtctgaagctagcatagttgaggaccaattggagaactatttgacagttggttatagttcattcctatgcatcaggtgtcccatgataggagtgtcttcatattttaatatggtagttccatgtaacccagtcttggttttgattactatgtagtgtgtacactagttaatgtcaatttgcttgtttaatagtgatgggtcatttatcaagaaactatgtgcaaatattataccatatcaacttctgagagatagaccaaacgttctgagtaaaacttgaggttttattgatagaatctgtatgtacgtgtatcatcaggaatatttggcaatacataaggaatataaattaaattattgtttttcgaactggcttctgttctcgattcaccttgttatttacaaacctttattcttacaagctccagtacaaactttgaattgtcgctcttaattctctgaaattagtcaaattactcttctgtctggcaggtttctagatccattggtg

SEQ ID NO: 14126 - DNA, 650 bp, Aquilegia coerulea
  Intron number 2 from transcript AcoGoldSmith_v1.009658m (l ocus AcoGoldSmith_v1.009658m.g) derived from phytozome v7. 0 (chr-ID scaffold_30; pos 2532257 to 2532906)
ttttataataaggtttttaaaagccttaattccaggtaatttatatttcctttttaggttatcagtcgtatgttttttttcccatattgtcatacaactagtcaactatacaagagccaatagaaaaaaataaaataaaaatagaagtaataataaacacgatttcgaaggtttattaaggttgtcttcgagcattgtatcctggggtttattaaggtaaagtctttagttgattccattagaagcaatttgtggtagttcccaattaagaaaggctcttttgaaattgaaattccatcaaaatataaggaaaactagtttttttgttgttgcggcaatggcactcttttgtgcattttggtttgcttgattagaattttggctgaccttaataatcaatatagtagggttgttttgcgaaaataattcaatgtggtataatgagttcaagatcattttgtgttttagatgcatatttgcagaatgcaacaactaatttaaccacaactctatatctttaataaataaaacaatcttcccctattgtagtataatatggtattgttaactacgtatttgctgtctacttgtgtctgttgaaaaaactattgcatctgtctgatggaacatacactgtgcttttgcaggac

SEQ ID NO: 14127 - DNA, 4041 bp, Aquilegia coerulea
  Intron number 2 from transcript AcoGoldSmith_v1.008654m (l ocus AcoGoldSmith_v1.008654m.g) derived from phytozome v7. 0 (chr-ID scaffold_53; pos 277186 to 281226 reverse strand )
ttcctagggttttctgtgcaggtgcagatctgaaggtaacttgtcaactctcattcaaaatcactagtctgattaacttgtatactctgttgaatacttgaatgagttttgattttgtttattgggtaggcctttcattgaacttacaaaattaaatgaaaacatagaagatgaaattttggagggagaaaccttccttgagggagtttcacttattgatcaaaaactaactttaatacttgacgaattctgggttacaaagctttgtataaatgtggaagttagtaagttactcaatatcagaatacaaatccaattttagtgctttgtgtggggacatagaagtgtggaatgcaaacaagaaactctattatctagatcctcctggactagtagtgttctgatggatactttttgccacctgtattgcattatggtcatgttaaacaaattgttagacattggaatcaacaaaagatgggaacttgactcctgaataacaatccagtggtttatagctacaagtgggtccttttgattgattggtatttagattttctgttttgaagtaactctgtcatcgtgttgaattgttgatactctactgtaaagtgttatagttcccagaagcaattacaaattgtgtatcccttttatctattatagatcaagggtgaccctatttgtataagttattagtatggttttgtgggtcttctgtcatttgcggtgttgcgagggctggcttgagaggagtagaagacattgctacataggaggggaatttgtggcgggataggattggctgttccaatttgagaatggttaacagttaacggtattggttcttttcgtattttcttgctgtttttgtattctatctatacttgtaggtcatctcgacccaccctgtttagcaatggcactctttcccccagcaaaggaaggaaacaactagttctagttttagtttcatcctcacattttcgcgatcatggagctctacacgtatacccagtttcagtttttttaaccaccaaggataaaaatagaagaatgcactccagaacaaaagtaaaaaaaaataaaataaaagaaaacaaaaacaaaaacaaaatttgtttgggaaaaccatcagaaaaggtgacgtagcggaagcgattaaaaatcaaaccttgagtaacccaaggggaggtttgccttgaaacaaggaagaactaaaacaaaactaaagaaaaataaattgtagagacaaatcttaattgtattgagtgaatcattgaattggttgaataattgttctacaaagcatgactctttatatagactaaagactaagaccaactagcactaggacttcctaaacaaagaaatcaaaatacaaatcctactttgaattgtattactaatatcaacttactattctagaacttctagactctaaaatagaaatcctaaacttataatgacttctaaataaacattaacccaaataggaaaccaattggtgtaggtaggatgtcctacatcagtcccccattcttcaaaagaattcgtcctcgaatttatgttgtattgatatcgtccgctccataagaaaaaatactttgaataacacagactcttgtaaactttcctcatattaatggaagttgtagttccgtcttttgattcaaaaccttggacttggagaacaaaaagaactttttgtgatagtatatgatcaattccaataaaatcataatgttgaacatctagaggtaatgaatctttcgcagcgatttcaactttatgatatttgtcttcagtaaaaattggttttgcttcatcaattttggccacgatattggaagaatcttccttaaaactcggtggctttccattaaaacttggtagctctctattataacattttcttctttaagacaaacatgatttgttggtggtgtggttgaaagtagggtttgactttgacattgtgagggagaagtaatggtggtataggttgtggcaaattgtggagtaatggaaatgtgagatagttgggaggtattacaaggttgtgagtattgggagttgtagtgttggggctgtgaggctaggttttgtaatggttgagggttgacattaatagggagagatgaaaaaccaatataggaaacttgttgtacaattgtggtggtaaattgtggtgatgggggtgggtgtggtggtggtatgaaagagggtgggagggtgggagcatcaataatatgttgcttaccttccaacttatcaaatcgaagagtaagattgtcgattaaagcggtgagacgatcaatagctgaattgaattcaaccttcgtcacataatctccaagattaccgacttgggagcggggtgaagaatctccgtttttaaccattgtaggatcgaaacgaagctcttgataccaattgacgtagcggaagcgattaaaaatcaaaccttgagtaacccaaggggaggtttgccttgaaacaaggaagaactaaaacaaaactaaagaaaaataaattgtagagacaaatcttaattgtattgagtgaatcattgaattggttgaataattgttctacaaagcatgactctttatatagactaaagactaagaccaactagcactaggacttcctaaacaaagaaatcaaaatacaaatcctactttgaattgtattactaatatcaacttaatagaaatcctactttgaattgtattactaatatcaacttactattctagaacttctagactctaaaatagaaatcctaaacttataatgacttctaaataaacattaacccaaataggaaaccaattggtgtaggtaggatgtcctacatcaaaagggctttgttgacccctcaaattcttgttggttgcctaaacctcgtggtcctctattggatgttatgtgcacttcttcctgcacgatgatgttaggaaacccagaattgtccttcgtgggtcagagaaggtaagttattctggtttggtgatagactgaacgaggtacaacgtcacaccttcctgatcctgtctctttcagccaccataagtgtgcgctcagatataaaacttaattgccttgtgtttggtaattgactatttcatgaaagaactctccaattgctttcaatcatccttgtttcttcttcccacctcctctctattttctttgagaaacttgattttctctcataacttttattatcgcacgatattatgatattgatttactttgtttatccacatttttccagcagcattcaaggtttttgttttcaattcatttctcactagatttcacacctttttctgaatatacccaactgctggaaagttctctaacttgaaatgaacaatatcataagttatactgaacaatgtgggaggggacaatcattctacgtgatgtttagtttgaggtataaccaaggaggttttaatgatgcattcgttttattgatggcactgttcaatttataatgtaaatcatgttatattgttaattagcatccagcaagtatgtatgatcatccaatctaaccatctctaggggcattttggtttaggcttttaatttttatgtgagcaatgtcattaccatcaaggcaccgatggtagtgaacattgttgagtcatcatgaaatgtgttctgtgatgaccttttagcaattgcagtgcattgtaattccgtaatcagtggatcttctacatgggagctttactctgccctgcaaagaagaaccatatcttgatgagaaaatttctcttaccatattccatttgctcgcttttaaattgcttcactatagcttatagaattttttggtttcaatgaaaacccacttatagcttgttttgcattttataatatttatggcacaactaaatgcattttcactcaatcttgttcattcattttcgtgattttatcattttataatgcccttaaaatttttgttatttttgagaagtatgttcaaagttacttatactgtggcaggaacgcagggcg

SEQ ID NO: 14128 - DNA, 939 bp, Aquilegia coerulea
  Intron number 2 from transcript AcoGoldSmith_v1.009441m (l ocus AcoGoldSmith_v1.009441m.g) derived from phytozome v7. 0 (chr-ID scaffold_15; pos 448082 to 449020)
atttctccagctttgttcgccaactcaacacctatgtacgtaattagctcttattatttacttttttttttcatagtattctttttaatagaatattctaaaaagttataaaagagtgcttaaattttaatcattttgaagttatcttcattaaaagagaaaccaattgaccaattgtttatatcttaaaggtggttgtttgttgttgtagttgagaatttgtagttttgatttgattatgataattgtattcaacaattttgacaaaaataaatatgaaaaaaaaatagaaagtttgaatcaagacgacaagacttgtttagcttctagatgaaaatgatgtttaattaagacttttttttttttttttaatttaaaaatagataaaattcacacacaagaccaagagagtgacttggtctactttgggtaaatatcaattaaacttaacatttagaacaataatagtacaacttctgtttgaatcatgttcaacagtttgaacaataatataaattgattcttcaccaaaaaataataaatgataatattgtaaataacgtaattctaaatatgagtgtttgttaataaatgtaattgaatgctcaattaatattaattatattccacgcaaaagccctgcaggaaggaatgtttatctcatcattaaatgcataatatgactactgtagaacaaattctacaggtcaaaatcttccaagatattgcaatatctgatctgttttctttggtttgaaaacggtttattgacgggatctctgtattgggacactgatagttgtttaaagtttcttgcaagattttgtgaagtttatgggctaatatgtaacagttgatataatgatatgtgtgttgcatgtctcatgtatatatatgttcattgtttccacagggtttccgaaagattgttcctggaag

SEQ ID NO: 14129 - DNA, 1388 bp, Aquilegia coerulea
  Intron number 5 from transcript AcoGoldSmith_v1.002078m (l ocus AcoGoldSmith_v1.002078m.g) derived from phytozome v7. 0 (chr-ID scaffold_7; pos 1439627 to 1441014 reverse stran d)
tagacaagaaaaaggtttctgacgaggttagttttgtaaactccctcatttaatgatgctcacattatgtggtgataagttgcatttactgttcatggctcttctctgtgtggggtttagctaagcacgctggctatttgcttgttgtggcttaggataaatttacgttttatagagaattagagctaaaatatttggctaacagacgagatcttattgaaagatactttcagtctctagaaaatcagaaattattctggataagtggatgtacttgtaattacaattacctgcaaacttgcacatctgtcaaactttgatgcttggaatatttagttccctgtatcgtattagttaattaacctgtcttcaaagtttatcaatgctacttcaatatgtttcctggtcattatgttctaagtatactaaaatataataatttgttggttatgattattcttctaagtcttaaacatcccctttaaagggtctatctaggccatgtgttctaatcggtcgtccatgctttcactgtcttctggacctatttccgaatcctgaacgatgtatgcctgatacctgagagtaggtggtttgattatttattgcataatgttagtgtgaatctgaaatcagtatcttgcaaagggccctttttttccctgacgagagtgtggtacctctaaaaaaagcaagttttaatctacttaggctccgcttggtatcccgtgtttgaatgcttttgcattagtttttgtcggtcccgcttttgatgtgtgcttggtagcaatagctgaaatttttggttatgattgctctcctaactcttagacatctcatttaaagggtctatctagcccatgcaatctaattggccttccacgctttcacggtcttctggatctatttccgaatcctgaacgatatatgcctaatacctgagagtaggtggtttgattctttattgcataatgttagtgtgaatcttaaatcagtgtcttgcaaaggtccccctttccccccctgatgagtgtgtgttaccttgagaaaaaacaagctttaacctacctacttaacaaaatttcatatttcctagattatattggatttcagtatgaaattcctggatgaaacatagcctaaattttattttaagaggtttgactctctgagtgaaagaaaatagtttctgatttttggagatgtgctcttttatggaaatttaatacaacataaaaaactaccccttacaattatcattttattgtttttctcccccctacttttcactatatatgtcattttctagattgttacttgaggaatatttgtatttgcatctcaatgttaaactaatcatagttatctaaacacaggtttactctcat

SEQ ID NO: 14130 - DNA, 897 bp, Aquilegia coerulea
  Intron number 1 from transcript AcoGoldSmith_v1.026067m (l ocus AcoGoldSmith_v1.026067m.g) derived from phytozome v7. 0 (chr-ID scaffold_54; pos 1357272 to 1358168)
gagttgtcaacttgctgtttctcataaaaagcaaggtgatatccaagtaccattttctaccttatttcattaatttttattattcaactcaattacatgctacctgataatatgatgtttattgctttctttgatgttatcacacatacttgtcactaataatactgttctgattgatcgattgatatattgttcaaagaagatgcatgaattaatggttcatgatgaatgtatagtatgattcataatcattttaattgctagttcattgacaatggtttcatatgtgtaaagttttgtcatcttaattaattttctttcattagtgatcagatttagtaaattgatctaagtgtatcgagacacttaagataatactccgtaaataattaaacacctacaaatccaaaatcaaactaattcaaatgctttggttattggtaaaactttgttacattgtggtttatgattaggattccttaattaggtggcccatacgttgcatccacatccaagtatatcttaagctggtttaaacttttttgttgttggttaaagttggtttgcactttgaactttggaatctcttgatgaattacttttgcagaacttttactactccatgagtaagcataaatgttgtatacttgtatgtgcatgcaggccatacagttcatgtgatgattctgagtttctgattttgaagcataagtaattttgtcctttagattgaagtcattgaacaattctatcctttttgcctttacttattgttgaagattgatcatcaaaaagtcatgaattctaaataattttgaaatcacatatttcaatggataagatttgaatcaagtttcaatatttcttcttgaattgcaggtgaaggaaaagttacat

SEQ ID NO: 14131 - DNA, 2809 bp, Aquilegia coerulea
  Intron number 1 from transcript AcoGoldSmith_v1.001482m (l ocus AcoGoldSmith_v1.001482m.g) derived from phytozome v7. 0 (chr-ID scaffold_21; pos 4124059 to 4126867 reverse stra nd)
atagcaattttgtttaaatatcaattattatttccagttcctatcattactgatttactgttattcgaagttgtctacttgtctttattgttattcctcgacagataaacattagcaggataagtggataactcatgttgtaatacacaatttataaatgacaagatcaacctgataaattgattaacatgtaaagtatatctaatcataagcacatcaggatttcatacaatatttataagacgagaaggaaaattctggacatgcaatgatcaagacgcaattagaggacggatattgctacaatttgtgaagacgatacacactgtacaactaacttgattcttcttttaggagcctctttgacacagtgtccaacaaactctttgtttcacttacacccctaaataaaattcaattaatatgcaagaatatgacttgagaactttaatggaggatctttattttcttattacagttactgtagtctcaagagaatcgagatacaatgtaagactggtatataagattatatttggatatttaaagacatcttaacctttaaagctgatctttataggatcaaaacaacccagaacacatttaaccttaaacttcattaggaaattgggggaacacttctgcgtcaaagcatgctggtatcactaccaacttagaaaggacaaattatacaattgaacgatggatattgatattaggttgtaaatcttataacatgagttttgaagaagcagtgggacagttttcatctcaaacttggcacttgaaagtacatagcggttagatgccgatgtctaacctaggccggagaacttgtaaagtgttagcaagagtaactaatagcagacactagtacattacaccattgcgaaatatcgttaatctagtcataacaatccgcacgataccatgtttaacactaggctacaaatgctcatgtgttacaagaattcagaaattatagtatgattagtatcaaatatacaaaactcataacatttcgtgaaaatcaacagctgggtacaaggaatagaacagtgccctaaattatcagtgcctatgagaaacatgttttgactaagcaatccttgaaggaaaaaaagttgttttatttggcaaaacaagttttgttcaaatgaccttttgaactttaatccttacatctacaaaatctcaaacattaatagatgaagtgccaaaatttcagattatcccccgttcatagcgtactaattagcacattccagagaaaaaaaaaattgcaaacttaagaaaaaatccttgtcgattataaggatgtaagggttgccgatttgtttccctacccctttgtggacccccagagatgactgagtttggggttttgtactttgagcttcataattcattgaaattggaatgatgcccgtgagttcagggagaatgtgctagattcgtagcagtgcccctcctcaatcctaaaggaaaacataactgcttaaatttatttactacagttttaaaagcttgattcactcacgctgtaaaatcattcttcattgttatggactacaaattcagggatcttatagaactttcttcactaaaggcagacgcagagcccacctttgtattaattcaaaaaaagaaaaaaaaaaaaaaaatttacattatattcctccctaagagtatgatcattagaaggagaatcaaacttttacaagattttaggcctaagtgattcttattattacttctctgtacatagaccatagtccatacaaaggtacatatatatgtacagtatgtggtattaactccataaatcaaagtgcttagcatgcttatgcaccatcctaaagggcccagtgaagctttttttgacacgtgatgattaaccaagtaacattaatgatactcttttatcttcaacgagataagaatgtacggatgggcctgggcttaaagcatgaacatccacacttattttacaacactcccccttgaatgtccaccacattaagattattgcctcattaaaaccttgttaggaggcaaaaactataacgaaggaaaaaaaaaatacaatagttgacattttaagtggtgttggatgctctttatactgcctcgttaaaaccatagctaaggaaaaagagtacaatgcacttaaaaagtttttttttttgataggcaagcagggttgttaacggggacccctacccctatattagaaaacaaagaaacttaaagctaggtacaaacatgtgtttatcacacattctctctccctatttctctcttaaaaataagtcaagtaaatacaaatgaagatctaacaattccctaccaattgatttctacgaattagtgtaggtttattttcgttttatcttaataggctaagtatgttctcctggatccactactgttgacggccttggacttgtattcccttgatttccttcagtagcttcttcttggcctgtttgtaagttcccactttgctcacttgtttcctggttggtactttgtgatacttgccttggtgaacaagtatgtcttcgcttcggtttctcccattccgcttccttgtcgagtagctccatacttttcctttcttgtgatttctctgattctgttgcttccaaagtcccagctgatgaaacatgttcctccaccacttcagcacaagttgcttcttttcctttgcttccatcaattttttcttcagtactgccctgcttttgaagccaaactttaccacctccttgtgttgctttctgtagctttgggcaattctggttgt

SEQ ID NO: 14132 - DNA, 1302 bp, Aquilegia coerulea
  Intron number 1 from transcript AcoGoldSmith_v1.010596m (l ocus AcoGoldSmith_v1.010596m.g) derived from phytozome v7. 0 (chr-ID scaffold_20; pos 2956412 to 2957713 reverse stra nd)
cttcaagtgctgctactgctccagaaagaggtattctctctaaccctaattgattcaagttcttcgttaaacctgaagaattttactctgtaacaataaattaaattaattaaactgaatcaattgtataattaatatgagttgaatgtggtgtatgtttgatttacttggcaacatacatagcagctaaaatattgtaactttatataacagatgatttcttctaaaagtttcgaggaatgaatcaagttttgtggtattccataatccatactgttaattgccacaactttagataatttacatgttttgtgtaactatagttgtttagttaagttgggtgcaatgttattctttcttcagtaacgatggttggaaacttgtattaaaaaacatatagaaagtaacagtaggaggagatatcaaataagagaaattgtaactactcgcaactctggcagtgatttcgctagacatatatgtgcttgttattgaaatttttactttgttatacacatgactgataaaaatacaaggttttaatatttatacctatcccacacatgcacacacaaatgaaagaatttatcttgatctactttaacttcacattataccttgatgatctattctattgtaaaatagtctacatattgtgaaaatagtctacatgaatgatcataatatggaaacagtcttgagggtgtttacttttcagttttcactcatgtcatgtatctatatacagtatattgtaacttccagcggtaattttgtttttgtatatataggctgtgcttgtttacgtggaaatctgacggaaagcaaatccacatcagattttccggatttttttatttccatttgtcaggtgcttgtttgtgcaatatataaatgagaaaggcagtaaaaatttaataaaacagcaaactacgtcagacattaatacggcttcgagattggcggaaatgactggaaaacagaaatcacgctctctcccctctacaatttcacccagttttgtggtccccatattttctactctctccacgtgttggttttgtttttttatttctaattttaacaagcagccaccgatgtaataaaaggaatatttctggaaattattttttagtaattttgtacttttccgtttccataaatattcctggcaaaccagcacagccatagtgtaacttgtacagaataagacactagttattcgtcttctgatttgcatcagtttcttcttttactgctcttagtagcactctcttaattggtggttctgatgtatcacag

SEQ ID NO: 14133 - DNA, 1658 bp, Aquilegia coerulea
  Intron number 1 from transcript AcoGoldSmith_v1.026929m (l ocus AcoGoldSmith_v1.026929m.g) derived from phytozome v7. 0 (chr-ID scaffold_111; pos 85783 to 87440)
atatttctgtttgatcggcattggccagtttgtcatgggagtttgaaatcgtggaggtttcttaaaatgttattggttcaatggaaacaatgtggtgatcgaggtttaaggtcggtgatcagttttggctctgcggctttgctcatgattatgtggagttgctttcttagcttgacatcaataaattgcctactctacgtacttcttagtctggtatgtttgcttatgtaattacttccattttgttctttatggttattgattgctgcttaatttgatttccttttttttaattgtgttgtgatattgaaatgagcaaatggctagagaaaataaagcactttaatcaatatttatattaagctacaacaacgtactgaggaagaatagatatgtcatattactttgactctaaaatctagagtagaattaaggcattggcgcccctgctttcaagagtaaattgtttgttttgaagtttcaggtggtttgataagatgttcaaacccctggtttaatattgcatagactttgaaaatttcatcattattggtaaggaaatcgattccacgacagactgaattctgtgttaggaacatccgtttgcgccagtattaaatctccaactggcaaattgatcaactacctgtgcataccgaatttgctgttttttattgtaatatatataatgcactttaaaaagctgttattacttcccctctacgggttctgttctgttatacacatttgacacacaaacaacggtttatgaagaattctaatatacgttgtgcattacggcattacctgatagcaatgaattgcaatcctgcttgcatgcatgcacacactcctttgtttaattgtcggttatgttttggtttaaagctctgaagaaaatgcatgtaatgatatcaatcttcatttttggtacatgcaatgtggagaccaatctctcgtgttacatggagatctattgacgaattaatattttccacataaaattttgctaaatttgacagtagatctcatttttgtggatcgttgcctatatatacttatcctacctatatgccatctgatcaaaacttttcagttgctataatggttatacacttttttgggggttgctgactccttcaactagttgactagcttataaatgagatgaatatgacaaggaaagagatgatatagtaaacaattatgcagaatagtcatcacaatcgcgggagttggcagtgaaggttggacaaagttatagtgaacagccatccatgtactagacattcctttccgactttttttatcagtataagttaaaattagaataaaattgaggaggagactttgtaagaaatgtttgaatattattttttaacttttcttaaaatatcatttgtagctggacatcagttgtttagtattcatgttttcatctttgaaggccctcgatgacctttaaggaaagagagatagaccgttcaactgattgctgaatctgttttctaatatgtttctagtttatattaatgctcatcatgaatatatgttccattcggtttaagactcccataaatggcttaaagaacattgtgattaaccctggattcattgtttaagggaattgctggagctgccgttcgttacctgggcta

SEQ ID NO: 14134 - DNA, 2129 bp, Aquilegia coerulea
  Intron number 2 from transcript AcoGoldSmith_v1.009966m (l ocus AcoGoldSmith_v1.007972m.g) derived from phytozome v7. 0 (chr-ID scaffold_24; pos 2872669 to 2874797 reverse stra nd)
gggaagagttgctatttgttagtagtaaggtaatgcaattatctttgtttttctcttcaccggtaaaaatgatctatttagaaatttgaagattttatttgtagtttttatgtatctttgttgagtttctctcttgacaccacatagtattatcttctctctatataatatatgtgaatttatataaacatgtttcgaggagagagctaggcaagaaatttcacttggtccagtaagctgggaattttcgctcttaccaattggattatcttttgtgaacaattaggaggagagctcttagctgctccatggaagaaacatctaatggatgtaatttcaacttttactgtaaggagagaatatgggaatggtaggagatggtgatgaaggggcagagttagtattaggtttgctagaatgctgcaatgtggaacaaaaagggtttgggaggctggagatgagggaaacagagtttttgaggttgacaacctgtaagtgatcatgtcatctgttttcaaaagaagataaacttgatttttagataaagcaaaaaattatttgccttcttggtttgtccgctgggatcgagtcagaagcttaagagtgagaggactaagaatccaaaattgagtttgtttgctgagaggatgatctgattataaaatcctcatcacacatctagagccaaccaattatgcaaagagggaattactttggtaagcctttagtttttattggtggtaatgagatttgggaggaggatcctctgacagggaatcactttggtaatcttttataatttattagtgctattgttttatttaaatcttttacaccatctgatgactttctacttaagaacatgtaagctgaagttacttctcgtataggtaaaaattgacgaagatgtcttggtgattttttcgggtgcttatttttgtcaaaatgcatctaggttctaagaaggaaatgcttttaagtttatcagttgtcaatatttagatttggataatttgttttccgtaattaatgttgcaaaagccattccacgttatttggaaatctgtgcttcgtgttgcacagaggattttttgttcaatgacaacttatataagcatgattgaagagtatatgcaaagttcattgtacaattatatattgattattgaatttactcttttgaagagaaaatgtttgattcacatatactttgttggatccttattattgcttctgtgacaacgctgcctagttgctctgacatacaaggcagaagcaaatgactaacatgttctatattcctttttcaattgttatttcataatttgagagggaaatgcatagatgcctcgctctagcaatctagcttgagaattttgtttgtttgcacacaagattgcctagttgtgcttttgtttgcacaagaggcctgccatccgatgtgcaaatcctttttataatttcatgaattgtaatatatgggccatttcacaaaagcattcatcattgttagggcaccttagagaattatattgtctttcatcataatggtaagacaacttgtgaaatacaaatttatcttaatatgacatgcccaaatggattattaaacataacgtggttgtaagatgatatattgttgttagaatatgcgagacttatatacttgtcgctgtttcctgactgactgtattctttggaaattttgtttatccattgtgtaggctggtttcgagcctacaaaaaccaattccctgttggtatgacaacgattcggtcatgtagattattgaatttttatgattgtaacttgtttgccttattttagtggttgtgaaggtgcttgagactatgtatacatgtctcttttcctaactgacctttctttgtgaatatttgttgttgtatgctttgtgtaggctgctactataaggctgacaagacagctatcaggccatgtagtttttctaaatatgctaagactgtaacattatttgacttgttttagtggtcatcaaggtgtttgaggcttatgtctctggatgtttactaactgaccacctttttgtgttactttgatgtatgtttgtgtaggctgctttcaagcctcctaaagctatacgcggggg

SEQ ID NO: 14135 - DNA, 1182 bp, Aquilegia coerulea
  Intron number 2 from transcript AcoGoldSmith_v1.005963m (l ocus AcoGoldSmith_v1.005963m.g) derived from phytozome v7. 0 (chr-ID scaffold_49; pos 1413662 to 1414843 reverse stra nd)
tgaagatcatatcggtaagcacaggattttcttcttttatgttattatcgtttgcatggtctaagtctgcgaatgtttattttgaatctcatgaactttgtcccaccttttgatggaccttgactcaaaaattcagaatccaattgtctgtttagaagtcttgtaagaaattcatatggtaaattactgcattgacttttaacaggataaattctaaagagctaccctctcaaagagaagcatggagctatgttaataagacagttttctttcatggcaagctaaaatgtgggatatttattttcctgtttgtcttggaaattgcaaaaaatagttttagaggggcagctctttagaatgcctctgttgaacattggttctttttgaatctctacaagaaattccgaactctaccagtttagcacaattataaagacgaagataattaataagcttgaaaacaaataaaaagaactacaaacaaataattatttactatatgttatagttttcgaaaaatattattatggcagagcacatttaatatagaaggttgccattgcatagctagccatgagagaatgatagtcttattcaatacgcggtaactttggtaaacataaatccagtaatattaccattggttcaatagtagtcagttagtcactttttagtttttactatgcctggattatcacaagtatcaccccttcaggtgagcaatcttggcattggaagaaaaattcacttatatttttgtgcactgcggagatgttgtagagtcaatggtgaagctctactgcaatatatgcatgtttatcagatcaaagcattttcaatgatataagatgaacctgttttacccctttgtaataatatggatattcattacttttttaaataaaacttaattccatacattggtattcacatatctttctttgttgaggtgtttagatcccatgatcgaatactttgagagacatattgaaatgttgtaatttttgccttcctagtatttaaaatgaaatataccgtttctatgtatggttggatttcattgtcaatggacattctgtctcctgctattatagatttcagtattacttttagatggcattgtagataattgtaggttaacatgcagataagcaagaataagagacaccaggacagagctgc

SEQ ID NO: 14136 - DNA, 1222 bp, Aquilegia coerulea
  Intron number 3 from transcript AcoGoldSmith_v1.009032m (l ocus AcoGoldSmith_v1.009032m.g) derived from phytozome v7. 0 (chr-ID scaffold_8; pos 4364504 to 4365725 reverse stran d)
aattgtcaagttactagggcaacaacaaaaagaaggtaacctaaaaattgtatcccttaattggctgaaacaattaatgattcgaaatagctctggaagatacacccttttttcgcttagaagattctttcattgtatagatgtggatttcttattctgtttaatttaaggagttttttttttttggagttcttcttggaattttgttttcttaatttgtgcaccaaaccatgctgtttgtgaaatgcagtttgcttttatgttgcaattaaaaatcatctttcttgctgatttgcttcattaatatttaatatcaatttttttatttaaatgattttcgggagagggggatggtaaatcatattcattttttctagtttatttatatgatttgtagacaataaaagtgacattcttattccgcatctacgaaatgccacaacgttgatcaaaattaatcgatttcgatagcttagctcatgctgaccaatttaccgcaactgctcaatcaaatgacactcttaaagctgacatgaagtgaaatgcagaagtgttaaccaaatttattgtgaagttattcatcaaagtcgtaggagttaggacagaccccatccttctaagtggtttatgtggaaagttctgtttttgaaccatgtttgtgcctgtatgcgttgaatgtactttgttaacctcttcttgcatctttctctcattttgtggagattgcgtgcattgcgtgtttgcgattatatttgcagtttaagttattgcagggaaaacagtggaagagcttgttacaaacagttaggtggttgtattattatgtagttaagaattgtgctagtattatcatttatcaatagttatgcctaagcatagtgtaatactcttctgtgtgggcagacatatactgtgtaagtactgatgcctttcttcaacaagtacgctactactacatgggcctcagtaggtgtggctcatagtatatgactggaatagtataaactttgagtttatttgttttctgtcaaattgcatgaatcttaggtggctggctcatggtacacgtccttcaatgagcaaatgttggtgtatggcacatgcattcttgtttcaattttaggttttttaacattcatgctgacttttgtttcgcctttctggtaacacgttgattacttcaacagattctgataatttctccaacaaaatctatcacatt

SEQ ID NO: 14137 - DNA, 1594 bp, Aquilegia coerulea
  Intron number 1 from transcript AcoGoldSmith_v1.004488m (l ocus AcoGoldSmith_v1.004488m.g) derived from phytozome v7. 0 (chr-ID scaffold_3; pos 9099735 to 9101328 reverse stran d)
tctctctcgatatctttagaggtcttactgtagcggtatattcttgaattctagtgttttatatagtgttgttgtaaatttctttatagcatttctctaaattatcggttaatttttcgtatatacatggttatggtactaagttagttagtaatatatattgttaaattgagtataattcaacaataaatgagctaattgaaacgaatttatactggatttaagggtgtgtttgtttgaaatactgaatactggttgctggatgctggatgctggatgctgaatgttggatactgaatgctggatgctgaagactgaatgctgaaaaagttgtttgtttattatttttcaaaacttctgttttacaattgattattttaaatttgacaaatttatcctcttttattctagtctttggatgcatcttaatgaaactgaaattttaaattttaaaaacatgaatctgaagttctttgcgaaaaaatgacatcacgaaataataattgaacatttaagaaatacttatagaaaacatggttaaaaaaatcaaacaaaataaaaacatattaaaaaatcgagacaattaattgcatttatatacatcattttcatttttataataattaaacctaatgcatatgatataactaatgaattatcatagaaagaacacattgaatggatctttcatgactaatgactattattgacttatatactgcatattcatccacaatctacaaacagatagggccttattttataaagatcaataagtagattatgtatttatgattatataataaaatataatatgtattaatcagttagcttggaaggatcaagagtgcaagtcggttcctcatgagattagagaagaatgaatcctatgtggactttggacatacgtataatgaaaggtattatacatgggtataattgtcataaaattataataagcattaagaagataaattaagcatgagatttgtgctggttcaaaatggctgaaaaaatccattatgttctgaacactggttctaaacaaacaacataaaaatcacttttcacttattattagcctggtccaccacttaaaaatcacttattgctgaacacttgttgaaacaaacactacctaagtataattgtcaaacttaaaatagttcattgtcatgaatagttagtagtcaaaactcaaaaccaacattttgttctatagattatggtagctaaggactattcttgtggttaaagtgtcattaaaacttcaaatgcagtatattttgtgttattataaattcgaaagaatggacacaggtgttgcattgtatatacatactgtatgatgaagaccctgtaattattgtgattcataaactgataaactgggtttaattgtcgacaaagcgaggctcttacttgttcaccagttaaaatgtgtatttgtgggatctatattactgccattgttaatcaaacttcttcatctactataaatgactgtgcatagattggttcgtataatgtgattttgttggactacttgattctgttgcattaagagatcgaatactatttgatgttgtagata

SEQ ID NO: 14138 - DNA, 937 bp, Aquilegia coerulea
  Intron number 20 from transcript AcoGoldSmith_v1.000056m ( locus AcoGoldSmith_v1.000056m.g) derived from phytozome v7 .0 (chr-ID scaffold_37; pos 1380837 to 1381773)
acttgcgtactcaggtatcttttgtgctcaggtcatttaataaatagatcagtttctttcaaatcattcttttcaattcttgctgggatgcgcatgaaagcctcggtagtcaaaaggacgcctaggtgcacctggctattcaatatgtaagttaagtggctcaaatagttgctcttttagctcaggtcagagataaaactacatgtaagacataaactttattttaccagcaacgatatgggaagtaagggggaggagggatatctcacgatatttatccatttttgggaaactggacctatatataacttagatataatttgatggatattgagtagtttttctcatgatattaccatatctcgtcttatatccaacatcagaaagcaaagtacagtcttctccacttttaagctggctcaggtaccgaaattataaactactttttcaaagatatcagtggttgtctatacttgtgtttctttcgctttcctttgtctcatcacaagcttcattcttctgttgtctttcattctcaaccaggaatcatgattatactctttgttaatcaattctttcaactgggtgtgccttgtgctttagagtaattagactacataattagggattttgagtcatggatctggaatgtccaacaaaagttcaacagggatgatcacagattatgaggatttgctcttaattgacagtgcttagtatggactagatgtgaccattgtttagaatgaaaatcatgtcttctctgtcagtcttctcaatcctataatattgtattgaatgtgagggttccaaactaaatcgattcagatgataattttgattggcataggcagatgagaccatcaccaattcatagattatgtttagtttgttgtcaactagttgtttgatatctcatagataaacttttcttagg

SEQ ID NO: 14139 - DNA, 4202 bp, Aquilegia coerulea
  Intron number 8 from transcript AcoGoldSmith_v1.000706m (l ocus AcoGoldSmith_v1.000706m.g) derived from phytozome v7. 0 (chr-ID scaffold_22; pos 3080129 to 3084330)
ggtaagcttcattttagttgtttcttcccctggtgtaattcttttggtgaatatgatgtattcattctgttggcaatgaaatgattagcgattaacaaggaatatgactatggaccctttagacatgtgtcttgtattaagtttctgttgtattctgtagacatgtaaattttgttatgttatgctatttgtcattatatttgtcagcagactgcccatactgtacatctcttctgtcagttttgggttatcgtctctctgaatcgggtatcatgctgaagctcttcttgcttgtcttattaattctattttggtagtgcacttttcacgtattaaattttgttgttttatggatgcgcatactttcaattgtctcgctgattgtcattccaagctcccacccattttttaattatcgaactactttactaaactgtattctattattgttccttaaaagtggatccttctttgccttgtgtttctttgcaattcccctacataaattaatttgggatgttatgccttttccttgtctcttactcattaattacagattattatctgtaaattagtctctgcgcgcatgattcttatcctctcatgttgctaatcctattatggaaataaatcaaatgtgcctcttgatccctctctccctattagttaagacattccaatctagtagtgtgtgcatcaggaatgattactgtgatcttttcttcaattaaataagcaactaattttttatttgtcatcttttctttctgttagggaaacagaaacgggaaggtggtctttaaatttcttttgtggtgaatccattatatcccctagtgtttctgagttagtctaaacaaaagtacaaaagaaaaatagacaacataaatgggaaaaaaaagagagtttaaattgaaccgaagacacatactaagttggaaattttgatacttaaaaacgttttagcactttgacttcgttgctgatgaaacaatagattttggtatctctttcttgccattttccccttaatgatgtttccccttaatttccattggaatttcccattataaggcctgatttgaatctagtgatcattggggttatgaatggtgtacaccatgtaactgttagttgtgtctgctgtatttttatacggagtgacctgccattggtatcaaggacagtgagtcactcctgccactggtatcaaggacagtgagttaaatgatatcgttttcgatgagattgtgatggctccttgagaatagcaaaagcgcactattgtgcgatggaaagcacaataaacggtagtactgagaaagtattaagattgattttcgaggaatgcattgaatgtctaggaagaactttaacctaaattttagattaattgaaggaaagcagtgcaaacatggaactttgagcaattttcgaagattttgtaacaaaaatacatgtatgtgagttattattataatttttatattattagtttgttgtggttttgaattctagacagaacttcaaccgttggattaactgaaggtgagtgtaaattatagaaagatagttgttcggagaaattttaataataatattactattttgttatggtgatgtgggtgggtgtgggactttaataggtaactaaaagaaatatagggtacgtggttcgaaggaattcagtttcgaaattacctatattttagccaaaaattatggaaaaaatattccaaaaaagattttctagcctagcattaaggaaagtggtttccataaaataaatatggaaaacaaattcctggggtgcctgtaaatatgtataagtttagatgttttatcttaaaacatctgtatcttcatcctcgcaccctcctcctttcctttccttgtttgatcttctccggctgatagtacttttaattccttatttaccccggaatctaaattccgtgaaccaaacatagccatagttgtattagaatgaagtacttgtgttattaattaactaatgtagacatacaatataaaaaaaaaggttgtatgtgctattgtgctgaaaatcttttaataaggtccttgaacagaagtccagagaaattcccttagtctagttgatgaaatctaaaagtatgtctgtcaatagatgttgtggattttatagtgaatcagggcactgtgtgtacttctggtgaagttgcttgattatagactttacatcacatctgcttttcttaattgataatccttttcgtagttaaccgaaaaggaactcgaagtagtgtcctactatgatttagaaggaactcaaaagagtaagtgttgttgcctacgtcttgaaaagggaaatatctgtccctttagatggggagaatgcgtgggttgggtctgcaaagagaggtactaatgagtttgtaggatacatttgaatctcccccttgatgatgctttctttcctgtgtcattctgaacaccaaactctgttctgataattaggagaaggagggtcttctctcagtcatattactttggatgttactcgtcttttaatatgggtgatttatctttacaaagacaagtggaatttcaattgttttgagacaaattttaatgctttacaatgcatgtggtctgggtcctttgtctttcttgtgtaagttgaatttgaagagtgcatacagttgcctctatccattactttggagtagtacaattcctttcatttgctcgttttgttgtttatttatttagttgtcattatcagcgttgtcaagaacttactacggctagtgatcccagctgtcaatagattgtgagggattctgtttgagttttgtgtccaaatgggtgtatgatatgtttgagaatgttcacagtttgccgaatttgtgttcaagtgttgcttcaagtgtagatacacagacactgctgaataggtaggagtggcagtgtcggacatggacacgccttagactcggcacagacacgtgtctgacgcggcatgtccgtgtcccagtcccagtgtccctcgtgctattaatatcggactcagcgtggactcggttctggatacagatttgagacatggatgtggatctacaagtgttctgagatatgaagatgtggatcaatcaagatatcgaattcgcaactggaattgtatcttcttctccttcttcatcattctccattttcttcttcttcttcccaaatgattcaccacttcctatcaaaatctaaactcatcttccagacgaatgaagcttgttgaaaaagatcatcagcaaaatataaacaagaactgataaattttctctccagaaatcagatctcaatctttaatcaactgagttggaccagatcggttgataagaagaaacatactgagagatctcactatcagactccagtgctacaataaattcccttattattattgtttgtggatacatttttagtatgatgtgaccctattattacttacaaatctataataacttcctcctgcagattgttgttacttgtatatttacaattgtttgtggatagactattagtatgatgtgagcatatggcaatgatggcaagggcttttagtatactgtggttcttttttctttgtgttgttgtgcttgtgtggttatttattgaatgacgtatatgtattttttttatagattatagaacatgaattacatgacatgtcacttatttttattgtttcatacatatataaaaaaatataaaaattatttcattcctgtgtccatgccttgtccgtatcccatgtttttggaatatggccgtgtgtctgagtctgtgcaacctacttctgattattgttcttgttgctaattatagcgtatttgtaacttgtggaaggatcaatgtatgcgtaagaatagggtgtcaattttaattttttcttttgcattgccaatgtatatgtttttttttttttgagtattggtataagattgtttactaggtgaatttgtcgcaaaagatcatttatatgcaatttgttcttgacaatgttttgttgcgatgctgtcacattacagttattttcattatttttctcctttccatcaagtgctgtggcaataatagtctgaaagacatttattagaaatttttggtaactaacgtctttgtctcttcttcagcaagcttgatcaactttccccggagaacta

SEQ ID NO: 14140 - DNA, 1335 bp, Aquilegia coerulea
  Intron number 1 from transcript AcoGoldSmith_v1.001632m (l ocus AcoGoldSmith_v1.001632m.g) derived from phytozome v7. 0 (chr-ID scaffold_39; pos 1202766 to 1204100 reverse stra nd)
gaagaaagaaatctcattggtggtaaagttattaagtaagttacccaaaacttataaaccctttataaatttgttttgattattttgatatttgtagtgaaattgatcaaaatttgtttttaattacatacccaaagcataatattgtatgatttaaattgataagaaaaaattattttaagtatgaatctcggaaatcgaaataccctttagttttgaatgttaatgctaaaacccccatttaagttttttttttcataggcccaaagtagaataagcgacaaaatcaaaacccggatgtttatttacttcattgtgtttcataatggggttctatggaaattgctcaaagaaaaaaaatattgaagaatgaatcttggaagtctaaataccctttagttttgattattgaatgttaatgctaacaccccccattaagttttttttttttcataaacccaaagtagagtaagcttgaaaatcaaaaccccattgttcatttacttcattgtgttagtaatggggttctatggaaattgctcaaagtttgtttttaataagggttttaatcataaacccaaagtgggatatggtttaaattgatagaaaaagtggtcaagtatgaatctaggaatacccttagctttgattttgaatgttaatactaaaaccccgttaattttgtttttgtttttttttccataaaccttcatttacgtcattttgttaataaaagggttccatggaaattgctcaaacttggtttgtaagtggggttttcgtactcgtaaaacatcatacaattaaaaagtcgaaagcacaacatttgtttgttttgtcattgttttgctcaaagtttgttttgaataagggttttaatcacaaacccaaggtggaatatggtttaaattgatagaataaaatgattaagtatgaatcttggaatacccaaatacccttagctttggttttgaatgttaatactaaaaccccattgagtttatgtgttgttgttgaacaatggtttttttttttcataaacccaaagtagaataagcttgaaaatgaaaaccccgttgtccatttactttattgttttacttatcgtgttaataatgttggaaattggtcaaaccttgtttgtaagaggggtttttgtactcctaaaacagcatacagttaaaagtcaaaatcacaacattgtttgtgttttgtcattgttttgatattattagcatagaatcaatttacgaggtgtttttccacaatccctcaatgagatttgagctataaggcatttttatttgtgatttttgtttagaattacattgccag

SEQ ID NO: 14141 - DNA, 481 bp, Aquilegia coerulea
  Intron number 1 from transcript AcoGoldSmith_v1.003298m (l ocus AcoGoldSmith_v1.003298m.g) derived from phytozome v7. 0 (chr-ID scaffold_10; pos 1991309 to 1991789 reverse stra nd)
ttctcattactctctctcaggtactagcttaatcaattgcaaaccctaacttcaatcaaaatcaggtttaaggtcattatgttcaattatttagattcatagttatgcaatttattgtcagatttcgagagaaattcgaggatgggaagatgagcaggagagtgattctgatcatgtaatcatattcttgactttatttgatttatgttttatgtagttaataatgttattttagaataattgtactttttgcgcaatccgaggattaatggtgtaaatgttttcaggatgttgagcagcagtactcgggagattatcatgattgcttagctgacattgtatgtttattggtaagcatttgactccgtcaatttctatttataaatccatcatcataaatttagtctctgtcatcttttgcctttgattttcaaattttcttcactctgacaggtaacttttcttactgacgagagtcagt

SEQ ID NO: 14142 - DNA, 2025 bp, Aquilegia coerulea
  Intron number 2 from transcript AcoGoldSmith_v1.020596m (l ocus AcoGoldSmith_v1.020596m.g) derived from phytozome v7. 0 (chr-ID scaffold_40; pos 1814670 to 1816694)
atcagcatcgttctagaaccgcagaggtaaatttgatctataatatacaaacaggttaggtatagtactgcatgtaataagaatttgcatgatgcaaaattgttacagagcttccatttttgaaatttttcctctgagactcgtccaaacagacaactacaaatcatactaagagaaaacgtatatagttttaatccaaaataaaactacttacaaattaatagtggtatcttcataactttctctttctctccaaataaattccctcccatagtatcatgcaccttgctaaagatttttaagttggacgtacagttcggaagctttaaaagtgttaatattatattgcaccatattttcactacattactttcggccttcatctacatgcatatctacccgaacgacgagttatgctttaatttatattattcactagctagaacttatgtcaatatatagctatgctctatacacatatattaccgatttaccagataactctaattggcctaacatcccaataatccagataagatactttggatctcttcagttcttaatcagatcgatctggtgatcttatttatttattattttatcgaaggtagaagtatatttatcaacagtgaaatttgcaatcctgaacagcaagtataatactctgtcaggtaacatggtaagcaccatgcagtacattagataaccaaaggagacctgcagacccaaaaaatgcgagttatctctgtcccactgtgctggacagttcctcagcaagtcatccatgcccacaacagtgctttgatccttttggttgcctcctctgccgagaaccttgtttcattaaaaatcacttcatttcacattgtccagaggtaccaaaccaccccatatggcaccaagcttacagaaacggacccagacgtgtaccattcagtgtaggccactgcttgaagctgccataatgttaacttgcgtaccagctgtgttacttcattacagtcacctgccaggttctgccagatttctatagcctttccacatctcagaaataggtgtggtatgtccttctcatcactgttacatagcacagacctatttgcgggctgccaccccatctccttcaacctgtccactggtaagattctcctccaagctaaacaccatatgaacacctttacattagtggcaatattgacatccatactagcttgtaaataaactcaatgccaagacgatcatcactttggttggaaaccaaaagttggtatagtagatggacttcactgagaaagttttctttttaaaccatacccactctcatccatcctcttcctcatttaaggaaacctcctcatgggttagatttaggcattctagttcaagtctctcactttctctaaagagagttctccttaaatatagattctacctccactccccatcgcaaggatcatagaccgaccccttctttaaagccgcatatctatgtacgtagtgctctttattgttattacgctcacatcgcagcttggagctgtgaactaatatatatggccatgtcttccgtgggtacaggggtatcaccccttgcacagagtgacttactacacccttcatccttggaagaagttgaacatgggaatatacttttataagcagatacatcatacactggagaacaaaatgatgcacttagccaaaaacctatctgcttcaaagcttttttcctgtatgactaagtgtaataataacagttgatcaatattgcccatctatatatattttaatcaaagttggaaggagagcatttggatattcatctaaagaaatttagtttaaataattctgcataatggcacctatatattatgaaaaaagtctaatggaaacaaataagcagtgaaacatattatatggcaaagaagtaaattgaacaaatcagctttggaaaatatattgtcatctcaatctctcctatggaacgcagttttggaaaacagaaattgaagacttgaagaaaac

SEQ ID NO: 14143 - DNA, 1042 bp, Aquilegia coerulea
  Intron number 1 from transcript AcoGoldSmith_v1.001103m (l ocus AcoGoldSmith_v1.001103m.g) derived from phytozome v7. 0 (chr-ID scaffold_18; pos 3092828 to 3093869)
cttttcgctttcgttgaaagaaaggtgagtgaggtgagtgaataagacaagtcttctaactaggttttctcacagaagaaattgttagcttgtttatcttcatctttcattctcattccactatcgcttgcttttaggttcaccagctttttctttcgatacatttgtttgtttgtttgtttatagctacttgatgtaatgatgtgatgtttaaatgtcgatcatgatcatttaattgtttttaggttttgaaatcaaagagttttaatgtttttgattattgtgtagttattgtttatgatttcagagttttattttaaagatttgttagaatttcacattgtttttatgatgaccaaaatagattttcagaccaaatttgtgattcatggtttgtacattatttagggttttagacttgtaatttttttgaatttgggtttgagatgttgattatcacatttctttatgaaaagtcttttatcggagaatttggctgttagaattttgcgattatgattcaatcagcttctcagatggttttctgatttttggtttagagaattcatagtttgtgtttaactttttacgattaattgagaaaatttaggtaattattgtttgggcgaatgagacctagattctgtagaggttacattttattagagtttggaaaatctgttcactgactgagatagtgagttttgagactgtttcactgcaactatggtttacatattctgtgtattttgcttttacctaccacaatgatggatttaaataatgaggttttgtacagaaacaaaaacagtgaaactttgacactgttcttcttataaatcacttgttagcaatttcagtaatcccaaagtggattttggtctactggtttacagtgctgtggttttaatgaatatgttcccttttattgtttgataattctaggcaaaatatttgtcgttttgaaacttccctggttttgaacattctgtaatgtgttttttcagagaagcatcttgttgacctcgagggcatatactag

SEQ ID NO: 14144 - DNA, 4274 bp, Aquilegia coerulea
  Intron number 1 from transcript AcoGoldSmith_v1.000840m (l ocus AcoGoldSmith_v1.000840m.g) derived from phytozome v7. 0 (chr-ID scaffold_3; pos 6983953 to 6988226 reverse stran d)
gttgtcaccttctcagcaatcttgaacgcgtgcaggtacacttcctttccaataatatcttactatgctaaatttgtagacatttttggcttgagcatagtttggtcatgagttatgccccaattttataatttaataaagctataactttaaggctctattctccagtctttataagcgcacacccaaacaatctccctgtactgactttatgtgaaaagaaaccttggttggatatattttgtccctaaaaactattttgataaaaatagttcaactaacgctagtttctaactcagtaaagtgtgaatttgattgataaaggtgtaagttttgagattacctactacaaatacaagagagaaaaaaaaacacaatagagcatctaatgaaggacttgaatttttatttgatcaaaaggtgcatgtaactatgtaagacgtcgatttggatagagacaaaatatttagattgtaagaagatatacggtagtgctaacacttggtaacttggaaagagaatggttgttatagatattaatactaatgttagtcttattattagtatattcaagaagatttggatagatatcatagacaggcttagtttttagattgaaatgatatgaaatataaggtccttaaaattgataaatcatgtaatctatttacaatactataactctaaaaatgagaacacttaactagcattgttttgttcagaagatggaatcttttgttaaaaactgcacagcatattacatcctgcgacctgcttccaattgtaacagacaatatattctcactggataaataccccccaagagctatcttgtgcagctactcgcctcctccctcagcttagacgtaataactattatataatagactgtttcccaaaagtggaaggaacataaattagataggacttatgccctttcaaaataaaggaggatcaatatgctaagggtctgaaattggtcaagtagaagttagcccaaggagatatataccttgggctatctacctggaggagggacgatatatatagacaccgacgacaccaacgaagattctgaatgggtccatctatctagataacattgtttttggttcttatagttggtgcaatataaaaggagaaaagcatcattattaataactaaactgagaataaatgtattacaaattgtggtatgaagtaaccaatctttttaagaggctgcagagcagaaaagaatgtaaatatgtaattaataagtgtgtacataaataaacccttggagaatatagatagagggaaaatgtccaatggaaggagttggtgatgaaatgatgatgtgagaagaccagttgggaatgtgaccttgttacagatgtttgcagtaaagtgtaataattcaggaataaattaaaaggtataagagaagcaaaggtgggttaggctacatatgaggacacagtgatctattttcagttgggttcctacgtgggtgaaaaaagatgtttataaacctgtacataatagagataggaagactacagattctaaatagtattcgatgcattatgagagagtcgtagtcaaagatttggatgtaagtacaaaatgaagcaaaataaccacaagcctgcacgtaaagattgaaacacaactgatgttaaatcatgtttgatgcattgtgagaaactcttagtcaaagattttactacaagtacaaaatgaagcaaaaattaagcacaagccaagcagtaaactagttctcggatttcagaaaagtgctaaaaaggaaaagaatgcaaacgtttcaacaaacatgaattcttcattaaccaataaatgaaggtagaatgagaaaaagtaatatccttgaaaaaattcacgtgtcctattaactttctagacaaaataacaccaactgtaaaacatacctacagtagacttgtatatagggtagtagggagccagactttcgtgaagctggctgtgcaactacaaaattgaaaaaaagaaacttggaaaagtgcaaaggattgcttttacatcttgaggaatgacctactgcggagatataaagctctgacatatatccgaatcagctagcagatggagccaatttctccatggggtatgactttgtgtaatagtagtccccttattaaaagttatgatgccatttaagcatggagttagagatttccccatagactcttaaggtggactacctcatctctaattggagttggactgcaaacttcttgatggtttggtgacagataatctagcccaaattatcaagagtataattctgaacattagtctactgggtgacggaattctttggactctgtatgtcaggtagttcaacacaaggagtgcataaagcgttaaggagatgctcagttcagatgctcagttctgatcaaattgtatatatatggatggggtaagctgatgatacctacataattgcagtttcacttgcaagtgaccgttccaggaagttggcctacacaagctaaactggtgcgtaggcaagtcctgaatgatgttctgtgcatctgcagacaaaaattataagcttttttattcccaatgtcccgttctagagatgttggagttgatataaagggattcttaggactgaactttgatgatgcaaatccactaccaaacgaaaagctattctgagcttatataaattcccaggtctaagatacctcaaatgtacaccatatcagtactgaaaactctatgacctgaatggaactttaagcgcttaaggattccatctatgtcagctgctgggatcattcaagatcagatacatgaaggggactagtgaatacttacaaggaagagggtcagatatactgaacaacaatgggaacaaagacttaaaagacaaggccttacagtcgcgcaccatatcagtactgaaaaccctatgacctgagcggaactttaagcacgcaaggattccatctatgtcagctgctgggatcattcaagatcagatacatgaagggaactagtgaatatacaagaaagagggtcagatatactggacaacaatgagaacaaaaacttaaaagacaaggcattacactcgcgcacaaagacaaggaagtcattgactgtatttggagaccatccccttcagcacagtcaagttaaatactgatggaacagtggacagattgatggtggagtttggaagactcatcagttatgatggtggagctgttgtggtagcttattaaggttggtgtaagaagagttattagatcttgaagcaacttgcataggactccacggatcttctgcactgcaaattaagatgatggtatgttctgtcttatccaaattggaaaggaaagaagaaccacaaagttactgtgttgatatgatagctttatccttagggagttataccatggactagctggggttaggcggaacaggactggcatttcagaacgcacagaatcagattaatttagatgttatgtccatctgtaagaacacaacgtaaataactagttatttaagtcaattggaagggtctcaaacgaggaagaggtaaacaaggtgagatggtatttgtgagaaaggggttacggaaccttcagttatgaacattataagctatggctttggagataattgaatggaaggagcaagaattcccaccacttttctggaccgcatgacatgtaatttgcgattacttattagttaatttcatttaggttttagtcttagatatcagtcacaaggaaaaagtgctagtctgtctgagtatatacaggctttttggatcaaaatataacttactttttagacataactatattgagcagataagcatctagttgattttctcccacttctttgtttgtccattgtattcgtgaaatccaaatctattaactgatttattctgtggcacttgggcctcgtttactggatactctttgcttctttttaatgtattttctgttgtaagtatgcttttcttttcattcacaagccctttactgcatctatgaatatttgagattgtagttgacatgtgttggagacatgccgtattaaaaacatgtcatgacattcggttgaagcgaatataatattgatttcctttttgtttttataaatacaaaagccatgttagaggagaatgttttaatatttgtgactaactttctaggctcacactgtgttgtttctgtgcagccgctgcaattcgtttgaggacgcttccgtgttac

SEQ ID NO: 14145 - DNA, 1467 bp, Aquilegia coerulea
  Intron number 9 from transcript AcoGoldSmith_v1.000622m (l ocus AcoGoldSmith_v1.000622m.g) derived from phytozome v7. 0 (chr-ID scaffold_72; pos 852421 to 853887 reverse strand )
gtgggcttgtttgggcacgccagttgggtggtgaggtaaattcagacattattgttaagtctgtaatgttcatatcatatatcaaagtttttgtgtactggtcatcaaaattcagacgtccatgttttgattattttctgaagcgttatttaattagttgaatttaattaaacatgggaaatatcatatttcattgttattgtaccaaattttagtagcttacatttgtggatgcataggattataaaactggcaaactactcttttcattttctctaggtctgctcttcattgcacttcctgcactgatgattcaggaatatgaataaaagagaacgaaaaacccgccattgaattgtactcaaagtagtcaccagatgctagaaaccaacttgatttaattatatcaatgtctttaacacttgggtgtgtgatggtgagcgacacaccacattttttttttttttttgaaactgaagtatctttgttatgatcttccaaattagttaatcacacagataagcatttatgcctattccttgtatgggattcaggatacagtttcgcagtgacattctggtaatttaagtatgttctgggcacatgtaattttatgaatttacgtaaaaaaaacaaatcgaaatctgtatcctgtacttgaggcctcttaatttataactcgctgatataatattatcttgactttttgtagtttacagagaacagagtaggagtagatatgggcttcttaatttatgctctagtatttgttagtaatcagaagttagagagaggaagtatgcctgcgtggcattagtgtgtaccaagtaaggccatatggtaatcatttatgaatttgaagaattcaactggtggctaggtgtttcattttgtgcaaaagggatcctctttgtgcataaaggaatagaaaaattatatccatcaccttttctcttcccatgtttctacaaatatttagggatgctttctgccaaagaggcgttaactttttaagaatgtctacattgctattctttggagttttaggaagagaggaatgagcgcgtcttcaattccaagatactcttttcaaaatgaaaacattatagttaacataaaaaattgctatgttgttaaacccattctgttgatgcttggtggtaggatagactgtcaactatgtgctgtttggaagggcctggatagatgtatgaataaccatttcatcgcatgcctgtctcaattattcagccactaatggttttagtctacttaattgtggttcttcttcatcgtctttatttttaatgttgtgaaccaggggtccaagactcagaagtggaaactgatagttcgaaatattcctttcaaggttctcattacaaaaatttaaatcactacttttcttttctgttgaaaaccctccttgaccttttacctaaaaaacgtttatgcaggcgacaacga

SEQ ID NO: 14146 - DNA, 839 bp, Aquilegia coerulea
  Intron number 1 from transcript AcoGoldSmith_v1.010809m (l ocus AcoGoldSmith_v1.010809m.g) derived from phytozome v7. 0 (chr-ID scaffold_2; pos 6197836 to 6198674 reverse stran d)
gaattcaaagaaagatcgatcagcaatctaatattgtgagtttacatctcttcttcaactttaatcttctgattttttttttctaaaatttccttagttttctttgattcatttgaaacagaggattgattgaagaatgaattagggtttatttgattatgggtagaacattttggcatcaaagtatcaaacattgaacagtgatttatatgatttaaatcaaagatatgaagattttttctttttttccaagaaattaatgaataacaaggtttgctttgttagagaatttgatatcagaagttatcttagtattcttttaaagtttttatctaggattatagggttttttgagaaatttttttaggtatttttttttttcctttgtagggtcttgtttggtgtggtgttaactgttaagtaacattgccatgattcagaaaatatcaaatcgatagaattaatgcgcaaaggtagaaatttgttggttgaagtgcaaagatgaaattagagaagtggaattttgtatacttggcaatggtttgtgagatgttgttttaacatgtatgaaaacatacaattgaaaactaattctgcaactagtgcaactaatctttgaagagatgattttattttttccagttttttctaagattgttatccacagttgggttgttcgtaggttggaccttaggaggggatactgttgtgattgattcttgacagtttagtgtgatctcaatttgatgtcattctgtaagattgaagatagagttctagctaacaattatattttatatgcagttgcccaaacctgaagaacgtgcaacaagaggtac

SEQ ID NO: 14147 - DNA, 3648 bp, Aquilegia coerulea
  Intron number 1 from transcript AcoGoldSmith_v1.011022m (l ocus AcoGoldSmith_v1.011022m.g) derived from phytozome v7. 0 (chr-ID scaffold_4; pos 3705352 to 3708999)
atactcctgccacattgggtaattttcttattttagggattttttttttattaataatgtttttattattatttttgttaggtatgtagataaattttggggagaagaagcgataaattctaaatagttagacaatttagttaaaattggatttatacaataaaaaccactcttcaataattttgtaataagagtgtataatatagaactgtgagatggtggagactgactttaggagaagggaagagaggacctggtgaagaagaagagagggagagagaagagagggacagacccaaaatctacggaaaaaaaaaactggatggacgcgtcacacaacatgtcttggataccatacccgacacatgaaagacctcctaaagtcgttcgaatatgtgaattatgtaagtatgtattatacgtaaagataataagtgtcgaggacattctatccgaattttccatctcagacacccatgtcatacccccatttctgatactccatgtttgttaatcaagtctatggtcagcgtgttgcacgctttgtacttcatactcctgttgtagttgttaggtaatgaaggaggatgacattgattctaaaacaataaaattgggatttatttcttttatgatatatatttaggtcggcataggttatttgaggcgatgaaataatctaggatttaaggtcttgaggacattttaaagttaaagagagagggggggggggggggggggggggtccaagtttatcagtttgatgccttcctcttgtgtttgaatgagttctttacactgtcatcatgcattatgtttgaaatattctttacaattgcatctaaagaggtttggtgcacatattgtctagccagcttatttggttttgttgtccttgttaagttataaaaagtatataggtaaaagcaaaggagagggaaatagaaaatccacaaataccacaagaagtctcaagtcattgatatcctctccaggtttcgtgcacagattgttgaacgaagtgttgatttctcatgagtatgagtatggtaaggatgagaccgcctagagcatgtatgtaaaagtggacactaaaagctacaatcatgtcaaattggatttatttgattgcctcgtggtgtgtgccatctttaccccgatgatgtaaaaagtggataaaaactgttcctttaggaggttctataagtaacgtagtccaatctttcagatctaattaatgagagattgatagggaactctttggctggaaggaaaagggggttagagtgactctgtttaatactatgtcatttgtgtgtatgtgtctgtctttactgccttaatgagcgtggttaacagagtattgggttcatacaagctgttatcaatatcatttagttgagacttgagttgaatgtactgggattcgattgtcttttacacacaacactataacagtaccactggagagcaaggccagatcttggcatttgtaaagtgtgtgatcgcacaggcccctgaattttacgagggcccagaattttggtatcttaattcttatatgtattgcaagtaacttaaaaaacagattttaagattacctaaacattttccatattcttgttcgaacttatcaatgagtatcacttattcacttgttatcaaaaagagaaaaatgtgggagtccttatttagtaccacacatatctcgttttttttctttagaatatttttatttctattcaattggaaatagagtcttaataaaaaaaaacgtttcagccacttttctatgttttctttgattttgtctatcctctactaggggtttaatactttaattttcccttctctgaatcactcccaaatccaaaagaacacgcacaaaaaccgaaaaaaatactgataactctgtaactgttgtctccccagctctttttttctcttgaatcacaatttcattagggacccagtttatgtttttctattgttaatttaatgttcattagtgacactttttaatgtaagggaccatgtataaattattgataatgtcataaactcacaattcaaacataggttcaaaaatcaaaaggctgcataatgtcataaactcatattcaaaccacaacatgataattaactaattacgacttcttgaggttcttcaaagttcaaacttaattaacaatcagcctaagttgcaaccttttaattcaaaccatccatatccggaaaaaaataaagtaagggtttaaaagcaaaagcacaaatagtgagttttttataaatagcataaatagcgcgagtttttgcccaaaagtgttgatggtggcccaatagcgtaagctttttgtgcaccaggcttttactagtaagccttaagacgagcttttgcacacctttttaaacactgatataaacgcactaggtatcacacgtgccttcggcaccctaacacaattaatgtatgattacctgttaatgtacttgattgtttgattttattattcaattgggtgaaattctgctgactcatatttgggttcttataacttatacttgataaagaaatggggtattaagcttctacaataggtgattatctagagttttaggaaaggatgacataggcatgtgttattagactagagaaacaggaaataggaaagaagaagactttggaagtagattgaatattagaatttctattttgtgtgataaatcctccaccatccgatctattaatatttatatagtgaaatccggagttaaatctgggctgttgtttgtaattgagacaaaaatcccacctataaggctataagaatagataagcctgaacactgatgcaagctgtttatcattatattgtttttttccattttactttctaaagttagtttgaatccggccggttcctacgtggtgaataggcatagattgagtgttaaaggcatgcggtacgagtgcagtgttcatcagcttcttgtcgagaggaagaaaaacggtcttgtcactttcttttactatagggtgtgtaacagataagatgagatcattgtaatggaatttacagttagcttatgaaacttgaaaatcaaaacatcatgttaaactagtagtctaaaaattaaaagaaatcctagttgcacttttctttttagtgtccataacggtctctaagtctgagcattttagccatagaatcaaactttcaaacacaaaaatgtggggttaaattaatttcttggttttttattggtacaacattgcagtttcatgtagttggtcaccgtcggtggtttatcattaactatttagatttataccaatgaggcagttcttgcacacatcgtttatatcttatcttttgagctcaagtctcttctaaatttttttaagttttgagtaaacatgttattctgcggatacaatcagagtggtgcaaattctttttttttgttggtcttagttgagagaactccgtcatgtcattattacttaggaggggaatctccttcatcttttgtgttgcattaaattattatcaatatatttttataatctattttcttttagatataaaccagtgatttgttcttgtatgcagataaggcagagaggttgattgctggtgctgctgca

SEQ ID NO: 14148 - DNA, 720 bp, Aquilegia coerulea
  Intron number 2 from transcript AcoGoldSmith_v1.004165m (l ocus AcoGoldSmith_v1.004165m.g) derived from phytozome v7. 0 (chr-ID scaffold_7; pos 6232918 to 6233637)
ggtaagtgttaggtttagtacttgtgaactatttttttcttgttgcttattatggtgattttactgatttagtttggtttatgtagttttatctttggtctatgttacttttagaactactttaatgaatctgaaatgttgttgtttgaaattagtttgattctttttcaatcttagttctagagctattgcattgtatatttgtattggcttttgcattgtttctttgactgtaattattttttattgcgctaaaatgaaatcctggtaaaagaaatgcaagagaaaagagaatatgtgtctaagttgtggtgatagaatcataaaatgcttttagacttctcagttgctatagtggtaaataaagggttctatcaaagtcaagtatacacctaatactatataattgtcctaaaaatcaagtattgagtatactgttattaaatagacttgagatcattacctttgacaaaaaaattgtaatgttcacatcaatggggctgcactccaatatggcgggtggtctttgacaaggacgaaatatttaatatcttagaattgtatccactcagcttttttgttgtagtatattgaccatatgcttgagcttcaacgaaaaaaattaagttgtttctgttagttcaaaaggataacccatgagtttattctttatatgtcactgcagaatatagaactgtctctggagtagctggaccattg

SEQ ID NO: 14149 - DNA, 3586 bp, Aquilegia coerulea
  Intron number 13 from transcript AcoGoldSmith_v1.000189m ( locus AcoGoldSmith_v1.000189m.g) derived from phytozome v7 .0 (chr-ID scaffold_3; pos 7661616 to 7665201)
ggattgagctcctgaaccctccacttgatgtaaggcaggtcttatctataagtttattattgtagaattatattttctctgctatttatatgttatggatgatttagtcttttcttcctgaccaggctcatggtaaaaaaatgttctttggactcgtctcattatctatatggtagttaatattgtcatgaattactcccgaaatccaattgtgtcaaaaactagtataagaattgaatccatgcttatggatgggatcatgatttcagaagtatatacactataatgatgacactaagaactgcttggttggatgaggtatccttactgcatccatgtaaggcactttgtatattcaggctccacatgttacttcaaaatctgaatctgtatctgattttttttttttttgtagggaagacattgatgtaaatctaccaaaatagatttcatccatagttagtgtggatacgattttttaacaagatttattttttgtttcttttgtagatttactttgaaatatagtactaatatgaattttttttttttttcattttattagagagacttgtttacttatgaattgtgcttatatttgcaacttttaatgtgaaagggatcacttgtcttttttgttatcatcaatatttcttttccatgtacatgtttggtcattgttctgatttttttttttttttgcaaaagcaagctggggttaggcagacccctaccagatatattaataaagaatatatttacatcctaggatacaaaataccttctgcatcctgagacacaaatgtcatcagttgcctaggtaaaggacataggaaaatacatagtgaatcatccctacttggtaaccctgccaggtaatcagcacacctatttgtttcccggtggatgtgttgcactgtgaagttttctagtccttgccccagttgccttgctttgttagtttgccttcttgccctccatgatggaatcatagtacccttgataccctctacagcttgcttagagtcagctccaacttcgagtcttctaatgcccatgtcaattgccaattgcatgccaatagatatcgcttccgtttcaatggttgtgactgttttttcctttgtaccaccacaaaaagccagcaaagtattgccagcatggtctctaaatataccacctatcccagcctttttttcagtaagtgatccatctgtgttaaggcatatagtctctccatcaggtggctgccatttatagtaaagcacagtttgtgttctccaactgatttgtgctcctgtatgatgggcaacaagtctgttcagggtattgccttgtactgttttcctcctcatagcatgtctgagcttgacaacttcaatgatcttagaacttatgaagtcctcagttctggttagctgctcaaagagccttctattcctctccacccaaatccaatagacagtagcacacagagcagtttgtcttacctccttatggaagtcctttccttgtaggtttgtactgatccatcgccattcattctgtgaactttgcaccccatgatacaacccgcaccattgaagtacctttgcccatacagtgttagagaattgtcagtcaaagaagagatgttggacattctcctgtactgcaactctaatagtactaggcatggtcgtccctccctgcaccaattgtagaggtgtaactgaacatattggggggtactcagctgaaggagtgttcactcttctagctataggttgccctctctgcacttgaatttcaggaatcccatactcatagttgcacaatagacaatttgtttctttcagcatcccccattgcaatagcttttcttgggtgatgagagcatcttggactgccagccaagtaatgaaagcatgcttcttagtggtcgcattattccatatgatctttgtccattgttgttttagggctcttggtctcaaaacatgataagctgttttaatagactacacacccctagggtgtggcttccaaacaatagtgtctctctgctgcaaagggtcaatttgtacttctttaatcttgtttcatacctcttctgtcatagagtgagctgtaggtaagtgccatgcctgattcctgatcaaagagtcgactgtagagctatctctcattcctgtgctctgtctgactgaagtaagggttgtctctctaaggtttccaccattagtccatggatcatgccatatccgtagacttctaccattagcaacatggtatgtgacatgtttttcaatgagttttctgcactccaaaattcctctccacatgaatgaacaatcaagaggagtctgcattgtccaaaaataagaattcttgataagatgtctttgaacccaagaaacccatagagagttctttccagctgcaatgtgaaaagcaagtttaccaatggcagcttgattccacacccccaagtttttaatgctcaatcctccttctcttttcgtcatgcagcattgagcccaccttatgttgtgtttcttcttccctagctcaggtcccgaccataaaaatttactgcataaggagttcaactgcttgatgattgtcttgggcacaaggtacactctaaaccagtatacagcagtgcttgaaagaacagtatttatgagctgtaatctaccagcgtacgagagcagtttgtttgtccatccttgaatctttttcttgaatttttcagtcaaagcctggcagtccctgacctgcaatctagtggaggtgagcggaagccctaaataagtaataggcccttgaacaattggcatgcccagagtttgtgcaaactctagttgttcaatttcagaagttcctccaaacagaattgagctcttgagaggattagttgtcatgcctgaaagctcatggaaagtttctagtgtatctttaattgcctttgcagatttcaaatcagcgccacaaaagagcataaggtcatccgcaaaggttaagtgagtaataagaggattctgacacttagggtggagagtatagttgccttgactgtgttgcttgagtactagcttcccaagaacttccattgcaagcacaaagagtaatggggagagtgggtctccttgtctgagccccctctctcctaacccttctacttttccattcaccaataaagaatagtgcacagttgttacacaggttttgatccattgtatgacattttctggaaacagtagggccttgagaacaacataaatcagatcccaactcagaaagtcataggccttctgtagatctatcttcacagtgcatctcttcttgcccccctttctattgtatctccttagaagtttgtgcgagatcagaatgttgtcagttatgtctcttccttcaataaaagcagcttggttgggctccgtgatgagtggcaaagctactttgatcctgtttacaataattttcgagattgttacagtagttagcatcattatatttgattattcacttcgaagagttaaaaataacgaagtattatgaatttatgattgcaagtggacaagggagtcaaagttcccac

SEQ ID NO: 14150 - DNA, 1135 bp, Aquilegia coerulea
  Intron number 3 from transcript AcoGoldSmith_v1.013182m (l ocus AcoGoldSmith_v1.013182m.g) derived from phytozome v7. 0 (chr-ID scaffold_10; pos 1913136 to 1914270)
agactactgttctgtttggctgtatagaagtggtggtaagtttacaacaaaactcttagttatgatgttaataatccaactggttctaggaatgcttatcacaagaacagtcttttgttgttcgtagtttctgtacatcgatcacctagtaactcatccacgtcggaaatcttgctgtatgtaacacatgcagtgccagtgagaaactcccttccttaattgtagcttaagctacacagcctacttgccctgtaacaagctgttctccagaaatgttttatcaacaaaaagtgctattgatccaaaaaaatgtatagttttaaacttaaaattcgtagaatttcaggtgaacttgaattattagaaattttagcttatgcataattaggtccatgttcattaggagtggtaatataccatgttccccactgaacttatatttgattctaccatgccagtatgtggcctaggatggaatcccttgacagcccttaaaccattttataaacggaacaaaaaaaattaattatattttaatttaagtcaaaagtcttacaaatactcttgaatgatattttgatttccattacttattatcaaattaaaaatatgtactcctacaactagttgtattattaagatgataatgacttgttagtgactatcttttattgtaagcattacagcctatatgcatgatattttacgcaaatatgttcgtaacgaaatcacgtaacaatcatgacgggaaagtccacacttgataccttgtattacctaccatcattatcctgatatttttgatatgaaatcacaataaagaaagttgtacccttagccttaggtatgcaatatgctgaacttatgttctgataattaatcagctttgtcagtgaacctctttaccttcaaagccctacaacaccgctgggctacatggaagataatcaaacaaaagcaatgatcaaaactaaaactaacatcgacatttaatgaatttaatggattaaccaaaagcttttgtgaaaattcttataacataatattgatgaagtttgatttatgtaaattaatgacctttatggtgcgcaatcttgtaggggtacgctctgctaacagtgcaagcacatttcac

SEQ ID NO: 14151 - DNA, 2945 bp, Aquilegia coerulea
  Intron number 2 from transcript AcoGoldSmith_v1.024649m (l ocus AcoGoldSmith_v1.024649m.g) derived from phytozome v7. 0 (chr-ID scaffold_49; pos 647928 to 650872 reverse strand )
atcgcgaggtttgtttctctagctgaattgtagtttcatggtcagcgtagatacattttattggtttaaacaatggtatgctaggtgttgagagttgagaacagaaagtgtgatttttttagggatgtaaataataggatttgtattttaattaaaatcgataagaaccaatagagtggcggtcatggttctcgttatggactaattgaattaatgaagttgaccttttaaggtgattttctagaggtggtaacttagctgagaacatcaatcgtagttttaaagtcagtgtcacataatcggcaggaatagtcctgctaccaaataggtcaggaatcaggattggttttaacggtcataactataattggcaggaatagtcttgacacttccataactagaaaagcatgattggttttaacggtcataaccatcaggattttctctaaaacattggctagtgatttaatgtgaattattctgtcgtatctggttagtgagtttgatccttctgttagttatgttgccaaaatgccttttgttttaaggacaaaggcccgttcagcaatggtccagaaatgtatttctctacttcggcaaactctaaaatagaattagaaagtaattatgattaagtcagaaaaggaattatcacgtaagttctgaattgtagctttctcctttctccttcatcggtgctactttcctggaaattccttaccaacttctacttagttgccgaacgggccctaaggatagtaacatattagcaactttaaatgatggggaatgagtgtagtttatatatgtgatcaaaggtcgctccaaactagcaattttcctgtatatatgtaataatttatttctattttttaccacatttcatgctattagttttccagtatattggtgttatatctaatggttagtagtgccatctagcacaagatttcgtttttttaggttcctggcaaataatggttagtacttatgatttaaagagagtaagagtttccaaatctttgggcttcaattgtagtctcctagaatttcatagcaacattagcatccatccatttctgacttctgagtagaaaggttgcctttgctcatgtatatagtaattattatgaaggtgctgtaatgttgacaccatgcaatttttccgtcattggtaatatgcatcataaaattcttagaaaacgatttttgtagtaataagtcactcttagaaggaagagggatcagtttctcgttcaagtcagtcataatgtccttgcagtaatgtaggggaagacaaacaattactcgtattattttggggcagattatatgactatgtgtaattgctccaagtccctgaaagtgcagtcatcattgtaattgttattgttgaagaaagactcacagcaggctatccatgtccacatcaatagagataggtttgcatatgacaaggatttttcttttagaaggatttgttttgcctgtggagtttcaggatggagctgataatcttttgggaggaaattttgtgtctaatgttgaaactagaaggtaggagtggtgcacaaaatgtttccatatctgagagaggttgtggagagacattataagggtttatgccttcataaagacatttgttttgaagtgaaatagttatgaaatttccttttttgttagagagtttataaaatgatgttttagttttcagaagactggcattacctccccatcaccttattcatgagaagaaacttctgaagcaaagttcaatgtaattctgtattgacaggtgcattgagaagactagaatgatgatctttacgtaaaaagtataaacacaccttcaacaaaaaaaaaatatttgttttcccattatatcatagcctttgaatgaatggagatttttttttttttttttttttttggataactgagaatttcatggaacaatttttaagcttgatactttcattaacaatcacagatataatctcaaaccaataaaaaaggtttaatgtcactgttcattgtacaagtgttctgatgtatgtgtattgattttttttttgataatgtgatgtgtgcattttacaagaagtaagtagataattaagcctactttagcgagagtgtaaaacaagaggaattaattttgcatgtcaccattaattttgactttcatcttgttgaggagaaggcttgtcgtagaaagttggaaacttgcttttagtcttagactcttagtacagaattaaatgtcaatttgagattgatggggtcttgaggagagttaggaattgaattctagaaacttgttgaaattggataggtcctttgtagtttacaaaactttgaattcggaagaatgctccacgatgtaaatttactctgaaagggactgtgtctttgtgtatgttcttattcagtaatggacgcattttgatttttcccacaccacttcttaggctgtgcatcaagactaaaggttgttctgctttgctttgtggtggtgtcgattctcttctcgttttcccatcttcagtccataaaataaattttgttagattaaatctgaaaactaattgataagacaacctactgtggatacatgaacgaccaagtcattaggattttatggggttattgggtcatggagactataaaatccactcgggtttaaaacggaaaatgagttttatatacatatataagtttgcaggaatcataaaattttaagtgtctctattttgtagattatagtcgtatattaaatatcttaatcctgattttgatgtttctacttatcattttgtacttgttttcccgagatattttccttgctgaaaaaaaaacacttttattgtggtgatctacctgtatggcttattagttttatgtcttttttcagtgttttaagtttaaaacagatcaagcacaag

SEQ ID NO: 14152 - DNA, 3503 bp, Aquilegia coerulea
  Intron number 3 from transcript AcoGoldSmith_v1.008217m (l ocus AcoGoldSmith_v1.008217m.g) derived from phytozome v7. 0 (chr-ID scaffold_100; pos 244829 to 248331)
ttgtgaggaagttaagattaaataacgaatcagaggtattacacttgaaacttatttctagaacaataattatgttatttttttttcaaatattagtggtgatagaaactgcagaaccaaggttcttatcaagtgatacttactccagatgatatataacatataggtagcaagtatatttctctggtactagtgtctaggtactccaactctaaactgatgtaaaatggcatagaatgcaagtcattgcctaattagaaatacggtttttgcgaagattgctattagtcttgcgttttgagtcttaactaaggaaggtataactatgtcatgtctagaacgatttggattgtctgaaagtagaatgtagtggtcaacaagactgagaactaccctctttgatccctccctaaaatgattgttaccccctaaacaacatttggtgtggatacttcaaaaaaatttaatttgccttagtaggctcatgtaattaatatctcacacaacattattattttaagtacatgcccttggagttaataatgattttaaaaagaaaatatttacaatgaaattgtaaacatcaaactatgaagaaggaatcaaactagaacacatatataaggaatcaatagctagctgcgtatgcgagaaattaccaaaacagaaccaagaaatcagatggtcctggttcctggaaatttgtactcttttattaagcaattctgaactaaactagttcagaacgcatagtgtaggtgtgtaagagtcagctaaacaaccaaagcatcatagaacttgtaggagtggaagaaggcatggaccctaggttgtatttactggttttagctttttactgaaaagattcattggcatatagccatatatagataattcagtttcctactctttgaagcagaaatgacaatcttacttcggttctgcattggcttatgaactagatatgtaggatctgtttcttccaaatcatccttcttctttgttccaggaaaaaggcctaccattttttgacgtcatgatcactgacatgctttcaaatatccctttaagcatatgagttcttaggttcctattgcagttaatttgttcccttttctcttttcaaggcaataaattaagttcgatatgctagacacttccaccagtgtcctattacactggaggtgaattcactttgaaagaactaaagacccttagcttctcaaataatgtcgagaatgtctttaattagtgacactgggctgcaaggaaatttttgcagtcctgttagttagtctccctattattgtttagtgatatgattcctcagatccagattatatatacttaatagtttccggacgcatttggtcacaggattgtacatccttacttctgcacaagtgaaatgacaaatttcaaagaatattaccatgagctagggataatcattgccaatgaaacaaggatgaatacatttttaagcctgtacgatcatgttgaaagaccaattgtaaaaataaaccatataatgaccacataaggtgacgcaaggtacttcaattccgaagggtttatctgcaatgcgtaagcaagctattttgaggagaattttcgtctaaattattgcactcagaaagtttgttaagtgtgtgaagcgaaattatgatagtcccacattatcgatgaagaaagtcccccctaatttctttgtagggccttctatgataaaaccccacacaatgaatcgatgatctctttcacatggtttgggattggcaattagctcttaagctgattgattcccccaccatttttttgtccacattttaattgattgatgaggacgggatagaacatatatatttgttttgtttggtaaggaatctttatctctaagtaatcacttttagtgctatctttatcgtaataatgttaattatatatataataaactgatagtagtatacatcgtcttgtttactaggaatgaagctaattgatatcttattatcttcagctatcatatgtattgactttgagaatatgaaatcttagttgaagaatcgctcttaagatcatggctttaagcaacaatcatgcatatattcataattactctattttttaagatgttccatgcacgcatgtttggcctcaccaacaacatatatagaatattgattgagtgaggaataaaactataaaagtataatatatgtttagaagaagctaacatgtatgccactatcaaacattcctttagcttatgaaaacctaatgattcttcatataaaccagttcaaggtcaacccttcagaaactgcgctatataattttctacctaatgattcattagttgtggcattaagttttatgtaattagacagctaacatgtatcgaaaaaagtttaaatcgtggtgttagtttcggataggtgatctaaatattttttcttcagagaacaaaaacaataattgtttgactaatactaattaagcttaaggatttaagggtacatttacaatttttatttgtcctgataagatagattaagataaaaatcggttataggttaaacgtgcatgattaatctaagagtatttgactaatgtgatgcttataattagatgccaaagtttgcttaatgaatattatcattgtgctttgttcacatataagtctgggaagaaatattatctttatgttacgacacagtccatgaaaatctaattaaggagcattaattctgccttcatctttgtcattcacatttcaactatctgcatgcaagaaatgcacctcctgtcctcctgtagtcttgttagtaatatagcatatacttagagattttatagtatcttagtagttagggaccaattccttccattaacatattgtttcggaataattgaataaacctactaggccatgactaaagatatcaaaatctttacagaaaagcaaacaattttaccaagtcatcttcattgtatgaccttatgatggagatagtcaaactaactatcaattgatttaacaatagaattcatgcacaatcgaaaagttcacaaatgcttaatgcaaaataatgataatcaagttaatgaactccaagtcatcgagggattgtttaatttagccttttctagcttgttcttaataaaattacaaaacatcaacagaacttcagaaacttcagattagtagttttcagtgacaacatgatgaagacctgtttgtttatttcttgaggttggagagaatggagataaataataatgcaatctcagttcaattgtcatggttactagtaacactggtcagccagcatatattaaacccacagactcccaagccattgttatctctactagcatatattttatagcaatcctctagccctgtcgacaatattgtgtttatacattcgactgtttgaagaatcccctgtactgattaataatctaaatgttttatgtttggaacaggtagaaattac

SEQ ID NO: 14153 - DNA, 2934 bp, Aquilegia coerulea
  Intron number 5 from transcript AcoGoldSmith_v1.011396m (l ocus AcoGoldSmith_v1.011396m.g) derived from phytozome v7. 0 (chr-ID scaffold_1; pos 6289339 to 6292272 reverse stran d)
gggtaagatcattctactgggctactggtaatataagctcatacttttttgggaattgtagatatgatttgttatgtagttcgttagtatttctgtagtttatttatttatttatttgctaaattggactttttttggaagaagggttaaggcaaattgttgaagttgggtggggtttctgcaagttggctttagttatataggcgtttgtacaaaatagcccaaattagagtacaagaaaactgatgatgaataaaatagtcccagctagtcttgagatcctgaaatcaatagtcagctctgtcctttaggttagcagttcaataccacagaatggccttcaccattgtgatcaggggatacgaactagcttcttttcccttgaagatgccggaattcctggctttccatactgtccagagaattccaaaaggtaatatgttccacatcattgcacccacggagctatttttacatgagggccacctagtgagtagtttcttgcctttggagggccatgtcagatgaatccataagattttagcaaaagaacactggaaggttcaatgttttgggtgggaatgtcaaaggcaacaagtagcaatttgcgtctttgccaagcaacacaccttaccaaaatattaaccttccataggcgcttgcatagctttgggattctgccagtatttgcagcagtgagctgcttgtagaaggactccaccataaaagaggaagttttactccatttccataccatagatccagtgtcatttgaatccatggatgggaagtagacatctagcattagggaaatgttgatggcttcctccatttttcattctctgaggcctctattcaagtttaggttccaaccaccctggccagcatggttgctcctatggctagtaaatttccatccttgttgcttgcaactctgaatactttagggaacctttccttgagccataccttctacccaaatgacatgcccgattaagatttattcccatttccaagttttaaagtttttcctttcatgaagtcagtctcccgccgctgaatgcctttccacaaactggtacaatgaggtctgggcactggattaggcaactaggcatgctccttagctgggtaattagctgcaatggtgcatttccagagtgtctttgttttcagcatatttccacagccacttggcaagtgatgttctgttcgtctccatgaatccaatatatgcgtatataggaatttaaggtgtgtttgattgctagagagaaacccatttttccctgagactcttttggcaagaggaagcttttagaggaggggccttgtgataatctcacacccttgaggagggctctctcataaaaaaaaaaaaagttttccaatgccctccttaactctcccatgaaaagttttcataaagtagcatgtttttgtgggtggaaaaaaattacatgctttcctatatatccattctttgttgtaaagattttccatcagcaattgggttctacaggtgaaaactactacccctgcacaattaattatcagcaccagttgttggatgtatggtctgaaacatagagcctttttatttgcagttttctaacatgcaccgagagtttaataactaatgttggttgtacctcaagtgatcgagttaccagtccttttttctggcttttctttagtcttgcataaatagctaaaagaagttctataaacagaaaggtcctcatagcttgttgtattctctagtttgtaaaactaatgtccccatacttggtaccacatgtttatcacatggccccacatcgttaatactcctggttgtgcttcttacattaattgtctttgtatttccttttattactttcatcatgatgtgtggggtatgacaatggcatgctgtgtgaatacatagcatgtcaagaggcagaggtaaatgattgcaaaaaggagtttatgtgtgtggaaaagaacgttggtgccatgtggagaacagagatttgtttgtaaattttatattgcaaaacccaaaagtaagtttttgatgaaagttgttttcttggaacactatggatgagacctttcagatgagatcacaccacacatgacttccaaataatgatgcatgctggtgccgcgagatatgcgtttgagacctctgcctcatccattaggctcatgggaaaaacacgttggagtaatttgtgtctgtatatacgtgaaggagagccaagccaaatgcatttgggctgaataaaaaatgaatcggttggtaatactgtagagggtatccactagtctaatttcttttttgtgggcaaattgctcaaccctcgttgataatcagaacgcgtactataaaatcgttgactatctgcttattcctctccatttgtggtttaccatattgcctgttaattcccatgtctaaaacatattagtaattaatttttctcctctgcatataacatgcgaagaaattatttcttgattgtgtgttttgagttttacttcttccccgagaaaattatatctgtgctggtgggggtagagaagtatataatatatttcgtactagtttattgatattcgaaatgtttcacgattttgaatgcaacacagcaattcttttgaggtttaggagaggggttagtcaaatctttggaaacagatcgctctgaaattttatcttgcattgtaagagtatatactatatagtatgcatgacactgttgtaaaatagctactacactccaccatccatcaaaacaaatagtgaaggttttattcagctaccaaagatcaatgtgcatgtatagcaagtggatctttacatggttagcctttttccaagactaggttttattattgttgttgttgacaggctgcaactcaaagctctgaagtgggagaaagcgt

SEQ ID NO: 14154 - DNA, 3402 bp, Aquilegia coerulea
  Intron number 1 from transcript AcoGoldSmith_v1.005213m (l ocus AcoGoldSmith_v1.005213m.g) derived from phytozome v7. 0 (chr-ID scaffold_1; pos 4196416 to 4199817)
attcctcaggtttattttctctctcaattttctcttatgtgatttgaaactttttttagggttttggtttcaatttcaattctgtttgatttaaacaaaggatttaatttggctctataaatgtttttttgttaatacttgtgaaattatgtgttttcatagatagaattgatggtgatattggtaactacagctactaaaactaaggagcaaaacttttgcttccattttaaaaagtaacctagtacagaagacggaatcaaccatgtttgtgtttgaaggacgctttcttttttcaattttgtcaatttatttcatgaaaaccacctacgtgttttaccaaaaagttcatttatattcaaatgtgtgtatgtggttttggtctcttaagagcaagaaagcaggatgcataggtatatggcttattaaaaccatggctttgtaagggtatcattcgagtgtttgggatgcatacctcacccttctagttattggtagcttgcaataacatatgacgagcaatcaaagttataaatataatatgcagaggcttcttgattttacctgtgtattctaatgattttgatgcttactctatgttacaacatgctacacacctagcactataatgccgtgatataacttttcaactttttcaggcttacgtttgagggttttaagggatctattggacgtttagttaaacaaaaaaactcttaaaagcaactttctctaaagccatgagagtttcttttccaagtgagagatacttgaaatttttagaaagcttatatagttatattttaaagtggttctgagaccttttttcgatcattggacttctttaatcaatctgtttcctcagcttttcttccgctcattccaagtgaaaaaaaaggattctccatgggttctaggatggtattaggtatatgttaagggtgtatcaatcaaaatgagtctgacatcaacctgaaaagtatgagaacagttctctcattgagttggatcctttcagcaaatttatgtacagtgccactgagagagaaaactgctattatttattaagaggggaaaaaaatcttaaggaactcacgaatgaatgccagttacagttaaacctcaataaatgaatattcgacaagtgaataatctcacctaagtcataaatttttccggtcccaattcaagcttttgtactaaattagtgttcgataaatgaatagactcacttagataatacatctttgcggtcccaagggtattcatttatggaggttttactgttaatatagaagtaattacataacgatttcgagatcaatttaaagagggaacttgtatgtaattacaatcagattataaatttgaatttgatatatgttaatttcttgttttgggaatcaatattctaacaacaggtgctgtgcagtccaagtaagtggcttatttccaaacagttctattgactggttatgttagatggtgctgttttgtggaaagcctgttgtctgtgccttggttttcttgctgaacatacgggtttaccatttttaaccgtgaagatgcccttttaggaatgaactcgcctgtgtcagttacagcttgcttgatgcataatattgtctatcaaggagtggtggcagtatgggtctggtatattaaacctgggttttaagatattgttcatggattaatgagtatgacggggaatgcatatgttggaagctctaatgatagatctcagtcaacaacctatggaccttttagatgctgcaataatttgaaagagtaatttatttctcggtttggtactttgccactggttggttttgattttggaatgggacagttgaatatgattttgggattgaatttagtacctgtttctgttcaatattattaaaatggtctttgacaggtatattactaggttatggagtagttctcgtaattaaatggattagcatgactaggatgtttcttgaatctgaaagttctcagtgtgtcatagagttccaccattttgcagaaaatttgggtgttccatttccaggtgatgttgattggtgggctatcttgaacggtttaatctctgctattgatctccacctatacaattaagttatagatttctattaattattattggttggatttcaaggttgttttgaaaagttttatatcagcttttaatatcaacctatctaagaatttatcgtgaggaagttatatataactcttaacaaaatgggcagaagatgtatgggagttgctagcagttattaaatgttaactggggcaacataatgggcagcattatgttgggaattgtataagccgtcaaatgttgagggatgataatggccagcagtatgggattttgttagaaggctatgataattgaattggaggtaggataccactgccaaacgtgttcgtggcagtttgagctgtatgcttgtgtcctagtgcaaggcatataggtgtaagttatcattgtggtggaatcatggagataattaagtggttgttgccagctctttgtaacgttcttggtttttatcgatttcagaaatggattctttaggaactgttttttaccaaggtggtacacgataatgcaactatagtagtatggagtcacacagatctttctaaagttgttccaagttctctggaaacttcttgatatacaataatttttcataattattttgctacacttttagtgtttagattgtctaattacacgctttcacccaagatacgaagatggttcaagagaactggttgtctgcacactcctcattcccattctggtgtattcattggtgcctcgattagctgaatgaagaaccgcattatggctttaggtatataggatctctcttgaaatagtaaatatgaaagaaaagaattacagttctacaccaaacaccaaagctatggtgaagactcagtttcattggaaacttaggtttggtgcaaatgtacagatgtagggcataaatggtttaagacaaatgggttttgggaaccttggttattgtttgggacttgggttttgggggactgaagtctattatttaactgtggtaattactaatggccgtgggaatctgttttgtatctccggttgtgtatatttgttatgtgcttgaaagtaaatgatacggcagttattgtgaacatgtcagttgtcagagtcttccgctcttgaccttgtttgtttttactcatgccatatgtggagtgggaggccatgtatacaggtagctgttattttgcaactgattgggatcttagacataactttttggagtgaaattttatttgcattttttttttttggacctggggttgataatttctaatcccttctggtgctttttacaggac

SEQ ID NO: 14155 - DNA, 977 bp, Aquilegia coerulea
  Intron number 1 from transcript AcoGoldSmith_v1.006521m (l ocus AcoGoldSmith_v1.006521m.g) derived from phytozome v7. 0 (chr-ID scaffold_27; pos 3505571 to 3506547)
agaaaggtgtttaaagccggccattgttcttcgaagtaagaatcttgatctatttgttctgttttatgtttatatttgttttgattaattggatttattagtttttcttgcaaacaaaatgcatgatttagattttagatctaattatatgctttcaatctattgaaatattaacagaaaaggttttattatatgaatgtgaatgttgaaaataatgtagaattgaagaataaatttgctataaacgtgtcgtgatgtattcaaacataactttaatctttatatttggtgctttaaggggaatactgaaacggataaatgattctatgttgtacttaacaaaagactaaatgttgatattttccgaagtgggaatgtttgaacagaatgatagcaggaacatggaaatgtgttggatttggattaagatcatgtgagaaaagtaaacaacatattctttccaatgaaatttccgtaagaggcgctacaaatctttcattgaaccacctcaaaactcttaaatccagttaaaataattaatatttttcctacaaaaggaatttccaactttatcatgaaattcgtatgtattagatggacaaaaaaggtcagaaacgagctccttgtatttgtgccgcagttgattgttcttttatacagcttttcgagttagagtaattctatagataaatattcaatattttgcaaaccctttatatgttttttttttattccttgttcattgctggcttgccaaactgaatacaagtatatgacattagcatgctttttctgaatatgacaaaagtatgtggcacaactgtcatgctaatatattttttagtttcatatggaatttttcttgaaactagcaatttatttagtttttcctttttgcaccttgcattcaacaaagaaatgtgttgatactgagatcgctttttattgcaggttgtcaatataattatatatagata

SEQ ID NO: 14156 - DNA, 1902 bp, Aquilegia coerulea
  Intron number 3 from transcript AcoGoldSmith_v1.010580m (l ocus AcoGoldSmith_v1.010580m.g) derived from phytozome v7. 0 (chr-ID scaffold_45; pos 753949 to 755850)
ttttatcttgctgctccctttaatcgcaacgaaaggtttgatttttattttgtatcttccccattttatcatgcaaatattttttttgtgtctaattttatgaggttttatgagaattatggttaaatgtgtatgctatagatgccctttacatattgacccatttcactacaatttttttccttttgtgctttgtaatcataatagttttttgggtaagatttagttatgcttatgaatcagtggttgtagtgagtagtgaatcattatggtgagattgtttgaaccaaataacccgacgttttgatggttgaattgtataaagacatcatcgttgcttttttttagagagaaagtaattaacatgtttatttatggtccttcaagagactgagattatttttaagaagagttggtgttcgcgcaaaacttttttaaagcaggtgggttagttatatgatggttttgaagtgaaacatgagatatccctttccaaattcggtaacgtttcaaagaaaattttggttgcgtacttgctttgtctttaaaatagtttggactttagaataaatttggagccgagtctgattttagggatgtgggttgggttagctggtaccatctacccgtctcattagtatttctagtttaatatattctttttcattgattaatgattctttgtgttgtataacttgaattctagagaaaaaggaggacattaaatcttaggttttcgtttatcttttgaactggtgtacttttgatttaagagacaaataagtatatgcaagaattacctcatactagcctacctcaggtgggttcatctactaattgatattttacagttcatctgttgtatactgattcgacaatatccaagatggttgttcatgagcctcatggttctgagttggtcctcttctgaagtttttttcttttaatacgtaaattggatttccggaagtacttccaattcagatatttctctctaatttattctgaaaatttggtaattcagatcaattcttttttgttctgctgcagtgggtagttttatggaccctttctggaagggaaattatttgcttttagagttggaactagtgatttggcagagtagatagtctaaaaccatcctcgagctgattcgcacttgattttacccccaaaaaaagaaatttacccattaaacagagtttcatgagctctacaaatttgattatagccaataaaacagattttattggatgattaaactttactagaatttcacttgagtttttcggggatgattgaatgttggcgtacagtgaaaacttggttcaagtttgtggtaaactgttcaaatttatggcaggaaaattgcttggaccattatatcatctagtttgattaagacagtagaaaacaagaaatattattgcatgtatggcaaacaaatattataggaaccttcatgtgcattgttgcatgtatggcaaacaaattgcagaagcttatgagactaatttttggaaatggcaggatttgtcatctctttttttcttgtggaatcatatctaaataatgattttgattgtgtgaattcctgatttaccaatgcatgctactttatgaaacttcaataggctattatagttgtgagttgttgcttgaaagtttttgagtaaataatctattgtctatcactctatctaatccatttcggaagtaccatcattttgtggtacttaatgtctgaatgtcatcattcttgtggcaaagaaataacatcctcttcagaaaattctaaacttcgtgtgataaacgcttatgcttcttgctcttatatcatcttattcagtaactaactctgttgcattttgcctgataggaagcgtctattcagcttgatca

SEQ ID NO: 14157 - DNA, 704 bp, Aquilegia coerulea
  Intron number 1 from transcript AcoGoldSmith_v1.009994m (l ocus AcoGoldSmith_v1.009994m.g) derived from phytozome v7. 0 (chr-ID scaffold_35; pos 2229406 to 2230109 reverse stra nd)
gatcttcttttaacatacatcatcttcttctctaggttagtaatgatattcaatatatttattgattgattgacatgtatgatgtataattcttctaattaaacttttttttagtagtttttatgatcgatagtttaggattagggttttgagattgttgattgctcgatttgaatcttaaaatacccatgtttctccccctttttatgatttattcaaaagatttgaactttgttgtatttaatcagatgttttgtttgataatagcttgtttgattcatctgttgttatcacttgtcattctttttatattattgaaattctttgtcttgtaagctttgcgatcaaactattttctgctttaattaggcacttaaacattgcaataccatgtttcccttcatgagtgtttgcaaatttacaaaccaagagcagatttcattattttacacagatgtaattgaaaaatatatcactgtgacttacacttccagcgatggttcgttcatatcgataggacaatatggataatacttaagcctcctttccatctgttaatgcaatatctatgactttgagtgtttttttttattacggataacttctttcatctttctctaatgaactatgcattatctatattattacttatgttgtttgatctttatattcatgcagtgtgaattggctgtctagcatctcaa

SEQ ID NO: 14158 - DNA, 1870 bp, Aquilegia coerulea
  Intron number 2 from transcript AcoGoldSmith_v1.006784m (l ocus AcoGoldSmith_v1.006784m.g) derived from phytozome v7. 0 (chr-ID scaffold_45; pos 1952482 to 1954351 reverse stra nd)
tggattcttggtaaacacatcaaaactcttgttagtaatctagaagaaaaaaattaattgataattagaactcttgattttatttttatttatttattattatactatttctatcaattgttgaatttatattatgtttaaataaatttgacatataattttggaaatttatgctaatatttggaatgacaactacaaatactttaattgaattaataaaatcataataatatcttgattagatgggttctagactcctcgcccattcgaatttaatctattaacaactttgatttttattttaattttggattatttaaaaaattagatttaaaagaatccaatggtctaaatccatgaaaaaaatctgagtttttgtgattgttttacttagagatttagtaacagcctatattatgttttaatgaaaaaaggaatctaaggaataatgtttttttccaggatacatagatcttatttgaatataataaatcaatgttccaacaaattaatgtaataataacaattaaatggaaagttttgatgataaaattctgacaagtctttgtagatgctatttacaaaaaaaaaatgtatttgtaaatgctaataataaataggaatattcccattaaaacatagacagagttttgtatgagtgtattagtaagcattatcagcttgccctgcaaatccacattcggaggtcgatcctgaatgcggtgggttttttttatagttgcaatttcaggttcagttgattttttttagctcttacaaattatttgtttgattgatttgccattacaaatttgggatttactttcaaaattaatcacaactagactaattaaggtacatcaaattatacacactacaaaatgtatttgtaaatgctaacaataaataggaatattttcattaaaagataaacaaagacttttataattgtatatcattaattcaattatatactctaaaaacacatgtacttataccttaatactgtgtagagggggaggggtagaaatgcctataaaaagattgtcaggattggactttgcactagcatagagtaaggagagaaattagtgtgagcaaaaacaattgcaagaagctttttatttgggttctgttttcttctttatacttctttaaaaacaaatttatttcatctaaaaccacatttgtttttataaagtttagatttaacttggatttttaaacttctcttatttgatttttctaccataaatcaagtttgaaagttttcattttaatattagctttttaaagtttcatttcaattataaatccttttgtttttgtcaaaaacttcctctgtttgttataaagttgtttgattcttttgctcaaagttgaaaatttgtccttggagggggtattctattttgtaagaaaaagtttgatttttttttttacatttgataaaatatgagtccttttcgagtttcatcaacttcttcatctttttcatcaaacacacatccaagtctaaacagtttgtttatttcgcgtagaaggtggcatgtaggagaggaaatagcccaacaaatattagatctggttaaacccactaaaacatctattcataatagaaaagcaattacttcatatttacaatcccttattaaatatcatttcggcattcgggtgaataccttccctacatttcatttttcctttttttttttttttttttttgttgataagactttattttaaatttataatgctttaatttatataaaacagaatgttgttggtgaagtaattgttttttttatttttttttattcttggttttcttacaggtacttccatttgggtcggtaccgttaaatactta

SEQ ID NO: 14159 - DNA, 615 bp, Aquilegia coerulea
  Intron number 1 from transcript AcoGoldSmith_v1.003969m (l ocus AcoGoldSmith_v1.003969m.g) derived from phytozome v7. 0 (chr-ID scaffold_14; pos 3443882 to 3444496)
gaaggtattgattctcagatcctttttttgaattctgataattcttattgaagaaaaaaaaaccgattaaaatgatttttttttcttcttcgaattagatgttttaaaggacatttgagtagttttataatttgattatattgggaattcattgattttaattttgatgttttttattaccctatgtgtgtaatgttgtatgtggaaaaataaaatataatgtaaacttgtttatttctttattaaatttaataatctggaaatttaacaagaggaggattgaggattgaggattgagaaagttaaaaatattttaattggtttaaattttgaagaatttgggcatgtaaatatatatttttaggttgttgttttgttgtaatgttaggttttgattttcttaatgttaatgtttctgcatttgtttttagggaattttttttttccgttttcaaattgagaattttttgtcgtttttgtgttataacatctttttgtggcgttgttggtagttggaatgtgaacatttctttccattgttaagactgttttagttttgtgttataatagattgtgtgttgcctgttatttgcatttcagaatcaagtgaggtgc

SEQ ID NO: 14160 - DNA, 4228 bp, Aquilegia coerulea
  Intron number 3 from transcript AcoGoldSmith_v1.003944m (l ocus AcoGoldSmith_v1.003944m.g) derived from phytozome v7. 0 (chr-ID scaffold_1; pos 7202720 to 7206947 reverse stran d)
agagctcggtaggaggttcatctggagcctacacggtatgttacaaacttaatccctgtatgtatatgcttccacatagattgtaggtaacatgttatgtcacatgttaaaaagtattgatggttttgagaagaatacaagatgttgtgcatcctgataaataatttcgtctatagtagatgaactgggtacctcgtgaaaatctgatattgatacctcctcttaatgggaattttagaaaaactttgtcttagtagttttcatgcaagtgagtataatatgtttccaggttcaatgcccatatctagtgaaatacctcattaactggtctagcctctagttggtcataagattcaaaaatcagttctacaaccctctttctgaaatcaataggattaatatacctagttcttcagaagaccgatttaggaagctatgctggataacttcattgttgtattttagtttcatgatttgcttgctcttgttcatggagtgaggatgaaaattcttgaacttagtttgcccccagtcaccacacttgtttgttgcttgattgcttctccatgcttagcttaccacaatacgagattcatatttatgatagatcaaaaagagttctaggtttagaatgctgcttgtcatttgaatagggaaacataatttgtgggtagtactatttgctcctattgggtttccaacctcagcctctgagtctggaccagtacatcaagtttcagaccccagttttcttaatattgccatgttcacacactgaaccaattttagcatgtccggaccccccatttttaaaataaacagatgagtgtttcgagttaaaaaaattgcatttagaatgaccgtgtacatgtccaagtcggatgagagtgttatgttaagaagccctaaattatttttgcaagggatgactttgtccatgtgcaatttgaacgagagtttccagtttaaggaaatgtccaaaaacccactaggctgatcttgtcttttgccaaatcggatggtgttcattttaaaacatctaaaagataacaagaagcggcggacatgtccatgcgtaaacctggcaggttcgtccagttcaaaaagctgcaaagagatctataagcgacaggcccatcaatgcgcagatgggacggactcgtccactttaaagaacattctctctagccatatctcttaaaacatctctctacctgtatctcttaaaacattctctctagccatattttccaacaaataggaagagaacttgccagcgcaatcactcaccactaaacaggattgagcaaatctatctctccaacataccagtattgctaacacccccttagcattgtgcagccagctggcaaatgaacaatcaacaaaaatatattttgttagatgccttcctccacagcgaaacagataacgtatctattagctaagattgttccctatcctttgttagttggaagttaaggccctaaaccaaattatatgccttatttatcggacaggccagaattcggaaggtggagtgcatattggttcagagccatctatttgttgtattcaattcagaagcttttgtaattacatcttattatcaggtgaactcacttagatgctgtctgcaacagagatggcaggattatggggagattccatgtacttcttttgcatactcgtggaggctgtccttagtggttcttgatatacttgggtgttcttgttgtagttttatttgtagttttgtgtaggaacataggattgtttttgtttcagctttttggaacaaagatatctcatcccctggctttgtttgtaccactaaaattttctattaatatattctgactgtttacctcccaagaatatcattcaattcagcagggctcaaccaattttgtctctgtgcacccaccttatcctctgtcgaagattgtattctaggcatgatctcttccatacccaatgaaatagataagaccttgtactacctgatccagtcgaccactgttcttcactgttggatgcatatactgaaatccttagatccatctctactgttggagatggatctgaaacgcacatatagtgctaggacccagcggaatagtaatggatgggtcccaatgctatatttgaggtttagatccatttccactacaacgattggagatggtcttaggtacttagccttcataaactgtgaagcaagcttcattaacttaatgtactgatatcattaactttttcaaaaaacaatcgagtgggttcaggacatataagatttgtatattggttaatttgcttggtgataatattgaaatgtcatgattatgaaaattccctgatttactagttcaaaactctatttgaccaagctaagatgcaccctatgtgctgatggaggagaaaagtaatatccctgactatcgatagtgatcgttcgtttggtcctttcagatggtgcactgggagattttgaagtcctaaattgaatgaagacttattgatctaagatcttattcaccacttaactgaattccttaaccaaacctcatgttttgcgttaagttcttcattagaagaagaccttcaaagtatgaataaaatagttcttagtttgttgttctaatacagtattataatatgtttatggccacttgactatatcgtaagtactatattagatgtatttgtggacattttgattgagttatacacttataaacattaaacagtacagtgatctactggtcaagacttgggaggttgggcccaagttcattcccaccttcagagggaaattgagaatataggggaagtattgtaactatacaagttgttgaacccgtgctacgtaccgggatttgtgttatccgataaaatggagaatccttataatgactttataagtgatttgttgaaccgagcttttttaatgcccttctcaacttaaatttgtagagattttataatgactttataagtgatttgttgaaccgagctttttttaatgtccttctcaacgtaaatttgtagagatttataattaatattttttgtatttagtatggtttttatagaagaattaaggactttaaatagaagaagaatttagtagaaaaaaagatttagaagtcggtgagttctaaagggttttaaggtttctataaatctctgctgacatggaaggtgggttccctttttaaattgggctgaccaaatttaagctttattctcaagtctctaaaaaaagcgccatgtggcacttgttgtctacaactattatatagtataatagataaaaagacactaatgatcattaatattcaatgacacatttttagtgtacttgttaccgggataagctcgtcttattgtcttaataatactatagtggatattaagttaaatacaaaagccggcatgtatgatcttggtatatgtatgcacctaagcaaccagagggcaaagtaggagcgagggttgtgcagaagcgagagcgtgaaagtgctcaatcttaaaatttagtatgagtattaaagtattggtaggggacaattttttccttaggcttgatatatttaacataaagcgttaagtcgagctttgagagcacgtttggtatactacataggcacttttaagttgctaaggtatgtactactattcaacttggtcatgtcagacactcgacatccatgtcatggatctacaccttgttggtgtatttgttgctgggctatggtactgtatgatcttgttgacattttggtttatgtccacaagtattagcctttttccccacaagttgaaaatgagtattttggcatgaaatgcatgatttatcagatccgcgaagttaacatattagataaatgatcaatccaattcaaatcctaaaaattgctgacttgtcttgattttgcgatctatgcacgcaagttgaacttggatatctcggcttctgttgacatatataacagctgttatataagtctctccctttgatgattgttgaactatgatatatgcttagttacttttctatttccttactgctttataaagattgctctagtcactctactgaggattactttttcattctagctggattttatgttaattgccttgtcaataaatgtcttaagttaataccaggtcttttccatttacagactaatccttttgacttgtttgagacgttctttgg

SEQ ID NO: 14161 - DNA, 1646 bp, Aquilegia coerulea; identical to SEQ ID NO: 14078
  Intron number 1 from transcript AcoGoldSmith_v1.003083m (l ocus AcoGoldSmith_v1.003083m.g) derived from phytozome v7. 0 (chr-ID scaffold_25; pos 610888 to 612533)

SEQ ID NO: 14162 - DNA, 787 bp, Aquilegia coerulea
  Intron number 1 from transcript AcoGoldSmith_v1.002670m (l ocus AcoGoldSmith_v1.002670m.g) derived from phytozome v7. 0 (chr-ID scaffold_10; pos 1896849 to 1897635 reverse stra nd)
tccttcttttcttccattatcaacctcatcttctggtaagaattttttttttttctagggttttagtttttacttgtagttgttacttgttagtaagattgtggatagtttatagacttgaattgaattctaattgagaggaaaatattgatttttttttactgctatatatatataagtagctaaagatttgtgtatacattactttgaattctcaacttatgcggcatagaatacggtgacaaagctaggaattttagatgatgggacactcatagagactttgttctattgctagttttctttgtttatcaagtagagtgctagggttaatatacctgataatttataatggggcatgtaccatatttactttgctactaactggttagatatggtattatcgagattttgtatgtattacttgtgttgtcaatattgttgaccatcatccacccatactcgtacacatgtgttgtaatgtgtttgatagcttacagtatttattttagagaacttaatggttatatgtaccttttttttattctttgtatctagctctagcataaactccatgatgttaatatattttctcggccctgtgtttgtgattctaaaattttatttagtatttttttttgtttctctttcaagtgatgttttatatttcaaaagtccacttgcatatatcagaattttgtttttttactgttgaaatatcttttattctattacatatacttatatgtcacactgtcacctaggtccacaaactcttccaggccag

SEQ ID NO: 14163 - DNA, 1800 bp, Aquilegia coerulea
  Intron number 20 from transcript AcoGoldSmith_v1.001182m ( locus AcoGoldSmith_v1.001182m.g) derived from phytozome v7 .0 (chr-ID scaffold_7; pos 1312793 to 1314592 reverse stra nd)
caaagtttcgggctcttgttgcagtgggatcattggtattttttaaactgattttataatgatagtaattttattttttttatagtaaatattttattggtcataaagaagtcattagtcaatacccccacaaacatgatactaaacaaatgaaaatacaatcagtgagctgatccccccttaaaatgaaccctccttcaaacaccaaccttaccaaagtgtaacttcttctcacgaatttggatgaatccagctccaatatagtcttgagtcttgactatatttgaccatatctcatttgtagtttccagatcgctgccaacttttctaggcaagactgaactggcagggaaggagatgctctcccagtttccatctttaaaatccctcaaaacacagataggagaaacatctttcccctacttcttaatttgcccagtatgtagaattcttccctgcaaaagacaccggagaaagaactggatcctaactatggacctttacaccaatttaatctcagagttgttgcctcaaacactggttgcatttgcaccacatcttgagtcgacacttaagatcaggctgtgagtgaaaatgccacttgcaaaagacgacaataaacccagaaaaccaagcctaacaactggtgacccacaaaaagagttgagagagaatgcattaaggaacaggctcattagcaaattgtaacatgttcatgaccaggctaccctcttccaccttacatccatacatcatcactgattgaacctctatcatcctctgcaaagcttccatcaccacaataaagaggaatgaagaagaggctatcattaataacaccaagaatgaggcccgtcaaaacactccaccatcgatactcaatccacttctctccaaacctgaacatctgctaagtttcttagacatcttcaacttatctataaatgggatttcctagctagtcaaggaatcctttacatcggcttatattctaaataagaattactgaagagaaatccttttaagtaataagaacacttgattgggaaattcagacccagctaaacatttttaggggtgaattttcaatattatctaaaatcataaaaagaaatccgaaaaattctgttttctctttcatctcatcgtttcttcttttccgcttcaatattccaccaattcctcctaactttccagtaagttgatttactggactgaatcaatagacccttaaataaagcagataaatgaagtggatggattggatgcctgcaaatggtggtgtcacaattgacacaagaaatatgctttgtgtcacacagccttaggtgtcgtttgttttttctagaattaagcactaaatactcattaagttctgaatatcacttaatacaatcagtcattaagtgatccattctgccaaattgtaagtctgaatgacttaactgaattattagttgatgaaatagattaagtacttaatgtttagtagaaaacaaacagtctcaatacggtgatccacccacttaagttcagccattcagactgcttaatgaaaaacaaacgacaccttagtgtgtcatgttcttcagtatgcatggcatgtgataggtgattgttaataattttttattcccccccccccccgccccctttttatgactacctttgttcagaagcttttcacaattacaatgaaaaggggttggaagacctcctcatgcattaacatgactcgcatcactcttgtattgtacaataactaactttgctgttggaattgatggttcttgagagcag

SEQ ID NO: 14164 - DNA, 2508 bp, Aquilegia coerulea
  Intron number 15 from transcript AcoGoldSmith_v1.001477m ( locus AcoGoldSmith_v1.001477m.g) derived from phytozome v7 .0 (chr-ID scaffold_12; pos 633588 to 636095)
tgttcaggtgcgcttcttagagaattttgtttatactcatgcctgagttactttttcgactgtggtacgtcaacatacttcctagaagttactgctagagtcacactatggtatggtaacaataattgctgaagtttgattattttcatctgggtaaaataaaacttctactaaaactgtttatagttaaaactatgtattattagttaatgtgaaccaaatcccagtacatactttaaaagattaaaactagactagattctcagtcaaacttacaatccaaagcatcgagagttcgcaaagtgaacagaaaaatatgctatggtatcgtttgttttttctagaattaagcactgaatactcattaagttctgaagatcacttaatacattcagtcattaactgatccattctgccaaatttgaagtctgaatgacttaactgaatttttagttgatgaaatagattaagtacttaatggttagtagaaaacaaacagtctgaagactgaatacggtggtccacccacttaagttcagtcattcagactgctgaatgaaaaacaaacgacacctatgcgtcacagtgaccacctttgcaatgctacatggatgctatgaggagagagacaaggcaatccatacgaaagagaaaatctattgaatatagtgagttgttgcatttcatcaaacacctttttgccgcttaaaatctagacacacaacttcctgtgccaatttataagtgctggggcttcgaatcactagatgcaaataactcacaatccagttgcaaaccatcaaattgaacatagaggaaattaccgccaacccaaaaacttttcccggaggtcagctttattagattttttattactgatcagggggcaaagttcaactgcaatgcatacacacgaatttgaccaattttcatgtacccaaatacttctctcatcctacaacccgccttcaactaacaacaacaattgatttttctaatggatgagcccatgatattggcacccgtgagttgtatatcagtttggtaatctagttcacgaattgaaggggttgagagtgaataacatattatttaggcagaatgattgcggataccttctgacctaaattgcagtttaatctcaaccatggaccttgacgtggatcactacgttttcaggaagaagcaagtttcacagggtaattctcagttcacaccaagaaaattgtgtggtttaacttgtggacagcatgaagcccctggaacagtctgacattggaagttttcataataagaaaagttgctagatttaaccttgagattgcacacactagattgttattgatcaaatccagtttctgttgtgattctatatctgctaagctctcgcatttgaccaacaatttgttactgttgaggtgaaaccctttaaaggtggtgctacaatacctgcaggaatggtccctgtgaactggtttcctagttaagttgttaaccatagctgtgacagaggccatcaaggctgttacatctgttggaccagataatccttctccacttagaataaaaaaccgagactccttaatggttgctggaattcgaccagttagattacaaggttggttgtgctgttagttgaaattgggttgtatgatgagagtagtatattagattattaggcatatgagacatggtcaaagtgccatgtatgcactgcagttgtaatctgtcttgatcatctaataaactaataaagttgacttgtggggtaatgtttttagttggtgccttgatttgatttttagaaaatataaatggacagacaggtaattttctataaaaaatgaacttgtgatattctacatcacatacccaccatttctagcgagaagaaatcctaaccttacaataggacaagataacatcccatttttctcccaaaatgccaaaattttaaaagatcaatccagttgttcatttattctatattgtaaacttgttaatacaaatgcacacttgttaggttaactaggtttaggctgtagattttagtttgcaatttgaatgaatttcagcgtacctcttggtactgcctgtcgtagggttttggtagcatctattgttttcacttgccatcgatctctttaattttctagcatctctgaatggttatcatctcatgacacaaagccaccacatcctttttgcactcttgtttggttgtgtatctagttttttaagtcagtgagacagtgacagatttgatactatcagtagttctctcatttcatgcttgaaattttttgaaccatcccatctatattttggctacctctctcttatctttacttcgttgcagcaactagttgcgaccttgtctatactatagtattacttgaggttctgctcggactcacctaattgaatgcataaaaacttgccaaactaagatacttaaaaggaattgtttttaatgaattttagccggagccagagtttcggccaccc

SEQ ID NO: 14165 - DNA, 2123 bp, Aquilegia coerulea
  Intron number 1 from transcript AcoGoldSmith_v1.025965m (l ocus AcoGoldSmith_v1.025965m.g) derived from phytozome v7. 0 (chr-ID scaffold_2; pos 1748652 to 1750774 reverse stran d)
actgttttgtaaatgtaagttctgatcctgtcagtaatatttgtttatcaatgtttgtaaatatgtgtaccaactatttaccacaccctacatatacattatatttcttagggtcaatttgccaatacaccccatttttgtgttacgtttggccaatacatcccattagtctaaaaattgttttttccacctttttaacagtttgacttagttaaaagaaaccgtcaactctttttgaccaagtcaaacccctgaaattacatatttaccctcatatttcaaactacctaaattttttgatttgatctaaaccgtcaatgtactatttttttaaatctactataaaccgttgattcttgtgaattagaaggatatccagatgaaagattaggtagaataaaaatcatgtagaacagtagaataaaggaattgattattattgtaaattataataatgaggaattgaagaagcttatgcaaattccagatccattgctttcaaagtgatggattatggcttcaattgatcagaattcttcatatgatagcagaggcttgtagagatatgttaagaagagtaccctatgagattaacgctttaatgggtgtttaattcgatgaaaagatcatacatttaacaaagatctacaacaatttgatctgttattagcttgtacagaattaatttagtggaaagaaagtaaatttcgctgtcattgacgaagtaactcatttcaacttctcttaattaaatgatgtgttagaaacttagaatttttttttattaagtagaaacatagaattggaaacagagaaaaaaaaaatctctgtagaagatgacggacttatgggagtatagggactcacaaaacttcaatttagattccctcattacaagcaagaatagctttaatttgtgatgttgttgggggtggaagaagaactccctagtacatacagtagttaggggtgacaatcgggtcgggtcgtgtcaggttcgtgtcgggtcttaacgggttgatgtgttttttccctaaacccgaacccgacctgttaacctgtttagtctttttttcctaaacccgaacctgacccgctaattaaacaggtcgggttcgggttgacctatttaaacccgtttcagatttattaattatttctttctatcgccactactgttatttataattgatattcatgataatcgatatttaatataaattaatcaacttgattttatcaaaaattaaaactattagtaaaagacaaaattcaaaaaaaaaaatcttgaaaaacaagggcacggtaaaacaaacaattaccataaagagcatagagatgaaaaacgttaacattaaaaccaattataaacctgagttctaaaaataaaaaaatactaatctggtttcaattgattaattaaaccatcatattccttaaacccaaaataaatcaattgaaaaacaagaaaaatatttacacaatctctaacttcgatttagaaaaataagaaccaccagcaaacaagtttttattaatcagttcattattactatatatttctccgtagttaaagaagaacaaagaaaacgattgttgagaagagatgaaaaagagaggtgatttcaaaaactgaaaataaaaaatattaattttaaacgggtttcgggttgacccgacctgttagtggtcaaacccgaacctgacctgtttataaacgggtctaacaggttcgggtcaaaatgacccgaaaacccgataagactaaacccaaacctgtttatctcgggtcgggttcgtgtcgggttaacaggttgcgggtcattttgccacccctaacagtagtacatatgttaaacggctaagattagatctacaagaaaagattgaattaacggtttagattaaattggggtaacttaggtatttaaaaattcaggggtaaatatgtaagttgaaaggtctgacttagtcaaagaaggttgactatttttttaacggagtcaaactgttaaagaggtggaaaaaacaaattttagactaatgggatgtattggctaaacgtgacacaaaaaggaggtgtatcggcaaattgaccctatttcttatcaatgtttgcaggg

SEQ ID NO: 14166 - DNA, 2931 bp, Aquilegia coerulea
  Intron number 7 from transcript AcoGoldSmith_v1.004558m (l ocus AcoGoldSmith_v1.004558m.g) derived from phytozome v7. 0 (chr-ID scaffold_18; pos 3713269 to 3716199)
gagctgctgaagcctcgctaccctgtgataacgaggtttgtttcttaactgcgtatattgcaaatataactttctttatggataaaatttctttttacgaccgcaacaattttatcgagacacgtgttggatacattcatttcagtgtcctatgtttaaagcattttagacttcaagacacgctaggacacttacacagacacacagagacatgaaaaataataagtatctgagaaaaatatcccgagaatctcgatgaaaactctctataataatgccaatgagctgtgtatcccaatatgaggacatgcataagaatgtgagatctctcccttcagaacctagaaagagaagaatggtaatggtttccaaatcctttattaagctcaagaacatcttctagatctgccaatcccttcagattgagagaatagctctccggtctgacctcagtcttccccaaaatttccactctttatcgatatatctggcgaaggagatatagatttctctagacctatcctgtttcagaaaaaaatgattagttgctctggcattacttttactggtgttgtcgagaccagtccagaagtttatactctctttaaaagacttagaaattagatgctccctttaagtttggtgttgtcgagaccactttttatactctctatctaagtttagtggtgtctggatgatataatcctgaggcaccattatgtattattcaatttttattaagaatattatatatttttatttttattagaggtgtgatacggtgattaagataaccaccctacacaaccaaagattacagcagttaatgcagtgttacaacaatatttttccaatcagcaattaggtcatcacgccgaatatttcacctaatcgaccaataattcaataaaataatcggttccagattgtagttttaatggcaatgataatttgagcctcactgcatgccctctctttaaaaatcctcttattcctttccaaccaaagctgtcatatagttgcattaaggagcaccttccaaacaagtcgtccaattaatggcaagttgccccacttccatcttcttaacagatcaggaataccacattccatgactagattaccatgagctgaaccaataattcactctatacggaattcacaaacgtacaagagacaaacagatgacgtattctttcttcctcagaagcagacactatgcacctgtttgccatcccattctccatacaatgatacacgagagtccgtcccatgtcagaatttgacccaaacaagactccacacaaaaaagtttaacttttgaaggtatttttgggttcccaaccttgctcacaggaaaataagtcatcgcaagttgcaactgatcattctcctacctgcgatgcagtcatacatggtcctggctgagaagacgtcgccatttccttcccacttccagcaatctgtctcgtataccacttcaagggctttcatcaactttacaaattctgccacctgtgcaagttctctgtcaaagaaggccctcctaaacttgaaatcccattcctgcactccatttacctgatgcagatattggctcacactataaggttcctcctggcatatgcaattaagaccagggtatttaagacaccacttgtcttcccaaaaattatttgcatgtcccagtttataggtaacccattgattaaacgtagccttgcagtttattatacccttccatagagagtatccaattaataatattgtatataaaaagttaaaaactatataatttccagcatatcctgtttccttatcctacttgtttaatataattgcatgtccacgtgtctgtgtcgtatcgtatagtcatattctgtgtacatgcttcttagatcaatgcagtcaatgaagttagagaacacataacaaaatgttgtgtcatcatataaatggttcttataaattataataaaaaaagaaaagtaagagaaatactattaatatttttttttcatcaaaaaaaaaaaaaaaaaaaattattttatttgatttcattggtataattgcaaaactatgggtttgcgtaattagcaagaagctgagcaaagtacccgcgcataccctagtacatgcatttccactttaacaatcacatttcgagtaattcttaaatccagacaaacctaaaccttaacctacattgaccccctgctttcccttgtttctttatcatcattgtcttcatcctgcttagtgcttaaccaatgaaaactgcctctagagactgaactaaaaattgtttgcatgagccgtcagataaacactgatatgtactagctgtgtgggatcacacctaaaaaagaataagagcaaggaaaaggagaggatcctaacgtctcctttcctaaaatgtggcttaaaagcctaataacttcttcacattggatataaattcttcgtagtttattgaaagatagtgtccacatctatatgatttaaagcttccatctaaatgtaacaacaatatttaggtcttcagatgaaaaagaaattaatttttttttgaatagtcaaactctaaccaatgatattacccagtagaagctttaggaatttgttattatgcaaaagtaagagttttgtggtaggtgtaaccaactaccagtggatccactttataagttgtgaaaagacaaaagttattgctgaacaactgaagcttgattaggacaggtgtgacttgagctggaagcaagcgcatccttacgtcatacctgtcctaataaggatcaaagttggtctggttgatgtatttacttttttaattttgatttaataacttgaagtgttttgaactactggtgtatatcatgagatccaactatccaaggctatctataattctagtgcctgttgtttttaggt

SEQ ID NO: 14167 - DNA, 1478 bp, Aquilegia coerulea
  Intron number 4 from transcript AcoGoldSmith_v1.007678m (l ocus AcoGoldSmith_v1.007678m.g) derived from phytozome v7. 0 (chr-ID scaffold_22; pos 2246887 to 2248364)
acttcagtcccaaaaattgcaccagaatcttgaaggtgctaatttctatcatatattgctaagttcatcatattgtgatgcaacatcacttatcatagaagaataaatgtctgatttggatagtattggaagaactgattttcttcatgggaaggattatatggctgtatccttgttctttttgtcatctcatatctgtccttgtagttcagttagcaagaagttacagttctatttatagctataccattttgactacaaaagtgaatattgttaccaaatttgtggccaagaaaaaggaatgttggtcgtcggaaactgagagactggataactgggatctgatagcaaaggaataaatattgggacctacaagaaaattatccccttttgtcaataggtcggctttgtatctctgttttgtctcattgaatccttttatacttttattaattaatagtactaatttcattaaaataaaaattttatttttatggagaaaatcaccgtactggtggatggaatacatcatacctatgcttggattacagtttcactcctgaagaataagtcatctcaaatgaaagtccacttagactaggatacccttgcatctgaatccaagcttgacgaacataactttttcctctgtagagaaaaaatcttcgatattccagcatctggctacaaattcattatggctgcccaagcaagctacaaagtcttcccaaaaccatattttttttggttggcaaaaatgttgtggtaagcctgtttttaatgagatcagtaactcggtaatgctggcgggattcgaaccccagacctctagtatcatcacccaaaggttttaccagttgagcccaactggcacctgccagtttcttttggtgaagttcccaaaaccatatttcttttggtgaagttcccaaaccatatgttatccctattcatttggaagaattcaagaatcttattgttagccatgtttacacttaaaccgtcctagttggtcccgatcatgactcaggaagatcgcagtgtcgtcaacaaaggcagaggtgagagtgaaaaatttgttcttttgcaacctccgatccattaacaatttaacgttctctattatgtagcttcatttgcaatcaataccccatcctaaaattgtctcccgtaaataaaagcttgtatctcagtgcttggtacaggcatgatgcagattggacattttcacaattttaacagagtgaccacaagttttttcggttttcagtacctattagtgtagaaaggttcagagtcacccacttataatgtggttttgtattcataaacaagaggtctgtctattgcactattatttgcattgtcacatgagatccatatgtcagtacgaatttcttgtcagtaacattttttcggaaacagatgctcacaattctgctctgtactaacaatccactttgtaggtgcataagcgt

SEQ ID NO: 14168 - DNA, 1305 bp, Aquilegia coerulea
  Intron number 9 from transcript AcoGoldSmith_v1.021095m (l ocus AcoGoldSmith_v1.021095m.g) derived from phytozome v7. 0 (chr-ID scaffold_41; pos 1080669 to 1081973)
tggtaagatcactctcttgacttctgtgccttcctcatctgaacttttctgttattgtattctgtgtatcttttctttttcaaaaaataatcttttctttttcttccttaattctctgagggttcctttttagtcttcactcttcagcaattttgtttggggtgatttaggttttggccaccgtaagttgatactaattaggctttggagtctttttctttggaaattaggctttagccaccaattttgaaccatagtccaaataaacccggttgaaccgggttatttttctaaataccagaaattacccctgtaaaattgcacatgataaaaaaaaataacaaaattgcatcttcttctctactataccactaccaggccaccacctggttcaacatgatgacaacttagaaaagaagaagaaaacactttctatttttgcaagaaagaataattgcaaaaccatcaaagacacaaacaaaatgatggaaaacaaggaaacaaaactcaacacccaaatcgattgaagcttcttcaatcaaaaactgttcttaatcaattggtaagaattttgtataaatctctgcatttctttgttcaattcatctctatttgattactttaatcttggattctctgtaacacatcttggggtttctttcaaatattgagattcaaagcacacatcttggggtttctttcaaacatgtcagtgttttcgttggataatttatggatgtgttttgaagaaattgagataaaccaaagatctttgtagtttaatttagatttcttggtatggtgaaattattgtgggagatcaaacaaagaagatgaattgaagagaagaactgtactcaattatgttttataattttttgtttaattttgaagttatcatgtgcaaaacatgtgaatttcacgggggtattttggccattttaaattattttttggttcaagtcgtggttgatggccaaaacctaatttccaaagaaaaaagctccaaagcctaattagtatcaacttatagtggccaaaacctaaatcacccttttgtttgaaacaagacttgcaaacttcttgtttgctacattgaagacattttcgatggaattatagtgataaaaagacttaactttctcagtttctccatgttgctttgccacacagttaccattttaaggttgacaaaaaattggacagtgatgtaaaggtgccttctatagtttcttgaaatgtttttgtcattatgtgtgtcccctcacagattaaagaaggagatcagctgactttagtggcacc

SEQ ID NO: 14169 - DNA, 2241 bp, Aquilegia coerulea
  Intron number 1 from transcript AcoGoldSmith_v1.020220m (l ocus AcoGoldSmith_v1.020220m.g) derived from phytozome v7. 0 (chr-ID scaffold_3; pos 8203398 to 8205638 reverse stran d)
tgttggaagtatcaaacagctcaacttcaccgacggtaagccaaactgattttatgtaaagcgttaattggcactagatacagtggcggccctgagggaatgcccaagaagctcttgattggggccaaccaactttttaagaaaaagtggccacaaaatctttactcaacctatacataattatttacatgccacaatgttgttctaagatcaatactactttttcaagaattattttcttttcttttaaaagaatttttttttctttatgtgtttagaataggggtgtaaatgtctgccgatattccgatttttttgatttcttatccaatttttttcaaatttaaaatggattattgcagttttgatttccgaaaaaaaaaatggaacggaattggaactactcatgtgaatctgatccgatttgttcgattactaacccgattcgattttgtcctaaatattccaaaatttccaataatttgtagagatttaaattattcttattttttgaaaatgctagctcttgatccgaatatattttattgttccgaaaaaaaaaaaaattagaaatttattttttccgaacgtaccatttccgatccgtttcgtccaatttccacccctagtttagaagaaatgtagctacacatgtgggccatctatgattaaatttgaattgggccgaccctgactagatagctatcagaggcggatctgtgaaggggctcccctgggcttaagcccagggtgtttttaggaataaaaactagtacttctacttactaatcatcttaccaagcccaacccacactatttcccttataatatcagccttcagcccacaccatttcttcttctctaccaagggtatttagttaattactaaatattatgctttgataattgatatagattgatttcattacaattgaattaaatttagttagttttcaaattttaattatcaatattgtaatttgggtttttattgttcaaaactaacacaagtacttatttagtcctggataatttaatacaaacaattcttgtaattttaagattctcttgatggtgtttagttagtatgaattaccgatgtctttatatatgtcagatgtcaagggaacgaagtcacattttggtgaaaccggaaaccgaaccgtagagcacgatttcaaatttttcggaaccgaaaccgaaccgtaagaccttaggaattggtcacaaaccgaaccgatttttacggttcggttcggttggtttctacgggttgggcttttttgggttttgggcctacaaccttaatatattgtggctttgagacttgacttaatattagatccaaaaaatccattggaccaatcatacattgtgggcttttagactttactactattattttttggttcggttaaccacaatattttgaagaaagaagccgtaaaccgaaccgtaagtaccggttctacaatttctaaaatcgtaaaccaaaccgatactctaaaaaccgttaaaaaccgaaccgtatgtactaggggtgggcacggtccggtccggtcctaaaatgtaataggaccgggaccaaaccaacttgaaagtatcggttcggtttcggttccatggaccgaaattatttgaatgtaaccggaccgaaccggaccaaatacaatcggtccggtttcggtccaaaactcggtcctgggcttttttattgggcctttagtccactacaatttagatgattatattcttaagttttgggctttaaacaaaataagacatacaccaaatcaagtactaaataggaaaaatgtccaaaaccaatgaaccaaccatggatccaccataagtccacaaccaattacaaaatcaaacaaatctaaaaacaaaaaaaaatgtctagtttagtaatttactaataaaaaaaatatttttttatttatttcggttcggttcggttctctcggttctataaaaacaagaaccgagaccggaccaatagctatatagttcggttcggtttcggtccggtcttcaccggtttttagtcaactcggttttgaccagttttgactcggttttttcggtttggttttcggtttttcgttttttttgcccacccctagtatgtaccggttcggttcggtttctcggttttccggtttttttcttacccctacgtaccatactataaaaacatctaagcatgactacttgatttaattaaatattgcagca

SEQ ID NO: 14170 - DNA, 2172 bp, Aquilegia coerulea
  Intron number 7 from transcript AcoGoldSmith_v1.001475m (l ocus AcoGoldSmith_v1.001475m.g) derived from phytozome v7. 0 (chr-ID scaffold_23; pos 533261 to 535432 reverse strand )
gtagttatcgtgttgagcggtgttgcattgtgaaggtgaaataatttctgttttatgctatttggctatgaagtgcttatttacttttccatacattatatcttcaatttaccagactttgaattatttgcattataaataatagagcgaattagtgttaccccacacttatttttttgaaactttgagatatcttatgcttctgttttgtaattagatttgccacatgcattttcatttgccttgggcgaacagtcagttgatcatgttgaatgttagtatgtaatgttctaggccaaaacaatcctctgattaatatctgccagaatggcattgtttatacaaccaccccttataagctaatatacctgggttgccatctgagtcattcagatgctatgatcgaatgaccacaatggaaactttgtggcaacacctgaaccattcagataatgtcaacctaattattcttatttcgttgttgatcatcttcttcatattttccggatatatatcggaagactgtcggattggggaggtttggcagttatccttccctgacaatattccggaatattcgcgaatatccacagatttcgtcggatttgggggttttcttcatattcccatggattgagggaatccaactctttttttcaatttttctgcttccctcttgaactttcaaacaattcaacttattcaaatcaatcttaaatataaactttctaattcaatcaattagtacaccacaaaaccaagtttcccttcatcaacactttttctttcatgctaaatactctgtttccctctgaattggatttgagataaaaaagataaataagaaggatacaatctaaagaagaatacaatctaattgaatttattatgaaaatttgtactcagaaaagaatttctcaaatttcatcgaacttcttcacaccttgttcttttgatttattcttcagaattaagactttttcctttaaccttccataagtttcttttaattcaaaatctccagatgtttattgaactgattgcaacaatattggatagtttttactaaaatccgaaatttctgataatttctctacgaatatttgaaaagctgtgtcgaaatggtgggttgtacatggcgatccagatccgagattcggttgttccgattctctgaaaaccggataatttcgccgaatatccacgattttaaacaaaattttcatgtatgccactaaccatcaatacatttagctccaatcccttctttttcactcccaaatttatcctcattgcgaatgaacaaaatgcagaaattttcgttgattaagacttccattttcttcttcaataagacaataattaatagttctccaatcaataaattttctatctgtatttttatccctttcaatattataatctttttgtagatattaccaagatctacatccctctaacaaaccatagcaacaccgttcaccaataaatataatattctatgaattcccttctctcctcatcaaaattcagcacctccaattaccataacaaaaagtactccataaatacgggttatctattctcgatgaggcacacatttgttctgtatcaatttgttgttcaatagtagccgttagataattgacatctgggtcgtccatgtgtctgtacaactaatcgtagggacagtactcaatatctcaactgtgattaaatgggttcatttctgttctagaacataatagactagtggtgaatgtggttaactgactgatggcctacaaagaaaatgtgtgggttatcactgtcataaaaaaagtcttcagtatctcaaagttgcaaaaaccaagtgtgcatttatgctggttctctctgaacagtaaaatttgggttttggagaagaggacagttcaagttctctctaattgtattatgctgcctttagttattgatgactgaatccatactgctttcatggttttgtttatagctcaaggtctgtctgattgtattatactgtcttcagttattgatgactgaatctgtactactgttttcatggatttgtttggttttttgtttaatcctcttgtatttataatttcttaattatttgtacgacgccattttacagacgggtggtggaaccattgatcttgagccttgcct

SEQ ID NO: 14171 - DNA, 1844 bp, Aquilegia coerulea
  Intron number 3 from transcript AcoGoldSmith_v1.000466m (l ocus AcoGoldSmith_v1.000466m.g) derived from phytozome v7. 0 (chr-ID scaffold_27; pos 2355148 to 2356991)
tcctgcttttggtagcggttcgtcctcatttggaggtaatgccttttcattttcagttttagttgcattcttggtaagactttgattgccagtttttttttatcaggtcatacttttataaaggtgcatgttcatctagaaacctttttatgtatatctgtagctgtcttgtagttgctccgaatctgtgcaaataatttaatttgcaaatggatttttgaccgcattatgctgtttgttagtgcataaaacgagtgtacatatttcattcacacttcactgtcttataagtgtattatggagtatgataaagataaacaatggcatgtttatttgatgctactggttgttctgacattaaaatctgtttgtaatatggttgaaatctggtatatcatctattccttttgaattaatacttattagaacgaaaagaagattgcaagattagccaggctggactttgatttttgaaacattgaatatctatgatttcatgttgttgagaaacatcgtcttttctttcatgcgcacttaaactgatttgtgtgtgtcaaatgcattttttataacaacagctgcatgtgaggaatacgagagagataaacataggcaattctgtttgatgcttctaagtagtctgatattagggtcttgcctatagaagaatcccaattttcattaatttttttttttgacattccatgcccatgactttttgctgtggagatacgttgtatattctgtgtggtgttggtgcaactgttgtgatatgctttgttattctgaagtttgtaatccataattagttgttggacaaaaattgaagcataagagaattaaagacaaaagtttaactttttcccaagaacaagaaatggatgtccaaagtagtaatagtctcagtcacatgctttcacttagagctgattcaaatttttgggaacattgattccatctagtgctgacactgtccccaattaatcacattccaggcctaagagggtggatgggccttaggtatcggtttatcgatatgtctgactggagacccgttatatcttgatgcttggagtctttccaagtaaataagggaccattcttcgtgaaattaggtccacacacccaacaactctttttattatacagctctttttaaccttgttctgttctttgaacatgttttcacagatcaggctgtagtttacttgtgtgactgtgtggcactagctagtactacatagctgctattatctcactatcttgtcataaacattactaaaaagaagagttctagccttagctatcactaggagaatgtggtcgatgaaaggtggattaagcgcaagttgtgaggacctcgagtcttacatcacagaaactaggcgccatttcattttgtttgctctctctttctgatttagtgatttttgttatgatatgtcatatgtgtggagacgacctgtttttgctacttgtgaattccagttgtagttttgcctgcggtctgagacaattttcccctaacctggtcgatgaaaggtggattaagctcaagttatgaagacctcgagtcttacatcacagaaactaggcgccgtttcattttgtttgagtcacaagtttgggactctctttctgatttagtgattttgttatgatgtgtggagaccttctgtttttgctacgtgtgaattccacttgtagttttgcctccagtctggcttcgcttattctttcgattagattaatgcatatgttttatttattgtccttgttctggtagctgacatctctttctgtgtgtaggctcttccgtttttggtcaaaagcctgcttttggg

SEQ ID NO: 14172 - DNA, 1004 bp, Aquilegia coerulea
  Intron number 5 from transcript AcoGoldSmith_v1.014994m (l ocus AcoGoldSmith_v1.014994m.g) derived from phytozome v7. 0 (chr-ID scaffold_11; pos 2709454 to 2710457)
tcaaagactgggaatccgttagagacaaaatatccgtaagtaatatttttcattgtgtttttcttctgttgtaaattggctgtttagtattactttgtgtttgcattttccaggatctatgattttttttttctttttttggaatgtgaaaaaaatctcgattagtttagacccatgggttgtttgttgcgacaaataattgtcatctccaaactacaaatcggtctctgatcatcattaatatatgattgagatgtgaagtggcccctgaaaaaaattctgtgggatgtaaagaaaaattcaatcttaccaccttataaatcgaaatgaagtatctacacccagcagtcataagttagattgttcccaagaagcatattattcttataaagaaatagctagatttgacgtctcctatagcctagcagtaatcatcctcagactttcactttcaatcccccagtcctattcacatctgaaatcaacctagtctgcatttctaccttccgggccttaacaaatgaggatcttcttactgaagaaggtcatagttgaagtttggaatttcatattatctcaatccacagtcaaacaaattgctgcttctatcacttttcttgttaatttatattcaataaaactctgagatatctcaaaagaatccaccgatggtggatagtgtatccttctttacaacgatttgacgctttacttcgtgtcttatataatatacctacgagtgtaatatacttgatctaccttcttgaatttgtattataatcctaaataaacaagcttattataaacatcaaatggttttaggcactaaggcgtagacaacaaaaaataaatgctcccaatggatattgcgatacgcctttaaatcttcatgcatttttttttcctgcaatacttaatctttatcaaaattccatcccttattcttctttattgtagattatattccacaatcacaagtcatttctctttccatatttgcagtt

SEQ ID NO: 14173 - DNA, 1292 bp, Aquilegia coerulea
  Intron number 3 from transcript AcoGoldSmith_v1.020341m (l ocus AcoGoldSmith_v1.020341m.g) derived from phytozome v7. 0 (chr-ID scaffold_40; pos 214519 to 215810 reverse strand )
gaagcagtccaaaagtcagaagagattgatataaggtaatcatactgtggaattcttgtttttcttcctgatagcttcaatatattgataatacaaacaaaagaatgctgaggagctactcctttgaagggtaaaaaaaagagaaagcgacctttgtagaaaacaaagttttttgctgttttatttcgagaagcttgaacacttcaaactatatctttgggaatccacagaaatcttcatagttatggaaccctcttagagggcagctgcttgccgttcctctgaacctacaattgatattaggctgccgttaccacactctctttggtcgcatagactcttagaagctgaaatatttttctctttttctttttgtttgttatcctatctctaacatagacacaggttttaactatttgtgttagttttatgtttcttactggcatatagttcatatttattccagcaagatatagagtagaatcattattttggtagttcagttaggggcataatgttgtagatttagaaatgtgtagaatatgacagataatttttgggcgactattctttattttctcttttaaaggtaattagtgttctgttctatttagttatttcggatttcagaattcagagtgcaaattcgtcaaccttctttttttcgcttttcagttgttgatatactgttcaaaagttcttttgtagcatatagtacactttatgagtattctgaaagtaattatttgctttttgttatatatccgttcttgtgtcagaatattggaggtctatgcgtcaaagctgagtatgagtttacacttgggaaaatatgtaaatcttgtggtatacccacgttttgcagttgaccttcttcgtgacagttgttccatatcttattaatgatttttatcaacttgcactaccataatcagtcttgatgcttacaatttagactatacttccaagccagaggtttctcttgtttttggccttatgaaactgaactttaagtgtgtgttgtgctatcactgttaggaattaataggcttgttttgcctatatttccttgtttgtagttaattgctcaatacatgtgcgcactgtgatcatggggtagatgggtattgatttatgaagttcatcctctcgcttggggaattgagctattgttcctttgactgagaatggaatacctaaagttgttttctttatattgtttaagtttagtaaagaaatactgttggtggtttgcaggcggagccccatctctattgcagcagccgttattt

SEQ ID NO: 14174 - DNA, 3384 bp, Aquilegia coerulea
  Intron number 2 from transcript AcoGoldSmith_v1.008916m (l ocus AcoGoldSmith_v1.008916m.g) derived from phytozome v7. 0 (chr-ID scaffold_60; pos 1151704 to 1155087 reverse stra nd)
ggtaagtacactatgcgaatttatgattaattgagtgttgattgatatagagtgatttgtattctttttacatgcacgataaatttgttcactccctttgaatgttgtattgccttgagcgatgaactgtcttgaagcagttgttgggttaggatttaggaaagatactaaaatcatagattggtagcgatattttttgtgtggacaaaaaataagcagctccaacatatcgtgcaaacatccatatgaaacatatgtgagtaaaactaaaatctgataaagtgggcaggactctgaggttgtttaccccagttgtataatctacaaaggacatgttacatgaggttcaatcagtaataacttgccatccagactggagatgatgatctgtcccaagatcaaagggcagattgtttattttggccttactcacctttcctgctttccaagccctatctggacaggcaacagcttacgtaccttcccaaattaaagttttaggcaacagaacaaattgaagtgcgagagcaccttcatgtatggtcgaaccaaaaaattagaaataaaagagcacctctcaggtggcttataaaaccttattggcttactttcaacagcctttagattcctacatggctcctagatgcaaagtatttacatagcttctatggagattctcattgtcttcgatatatactatgacgtgtttagggtgctcacttgttgtttgagtggtgtttattagagacagaagattttgaaacaacttttgatggaatatatgagttagttggcaatgaagggattagaatatagtgatagcctgggttaaatcccatttcaaggtcatgacatggaggggaagttcaatcaaaatttattttggtagtgccaatagagttttgactgaattgaataatcttttatagtaaatcctagagagactacccaccaaaacaaaaccaaagtcctcaaaacttctagagtttatattttgctcaatactctttttccttatataaacctcaacattggttaatgcagtgctctatggcagtggttctcgaccttgtttagggtgttttcaagtaattgcaagtctattggatgatttttaaataaggaatatttatttcaaattctatcccatcttcgttgatcttacatcttaagtaactctgtattccacaccaccattttgcctaagattctgaaaaatctatagtaatcaatattgatcattcacaaaatcgcagataaccccaatgtaattccagattgacatggtttttactttaaaggtctctactgtgatagaataagtcagatcttattgagtttaaaagcagtctagcgtagacgaaaatcattgaagatccaaattgaagaaggattgatattgtatctctttttgtctaatatctccctggtggtgaagccttttcaaacagaagcacatttgattcccgaaaaatctcgagttaactgtgctcaatgtagaacattaccaggatggggtgacctactgaagtttgtttgtgtaaaaaacccaacactgttagaggactgtagtggttatttagtagggacaatattgtgaggttgtatattttggattgttatatggtttagtgttgctagacctcccaggctttgcaaacatccaagacgctcatcatcccaaccaaagtttttccaagtcagagcgccatcattttgataagtccatatttcttaaacatattgatcaaaattcatatagacacttgcaaagcaaggcttcattcatttgtttgatctttcgaataccagtccctctcaaatgtcaaggtgtggaagccttgtgcatgggggtgtcatatctccttgtcccattggtagagcagccaaagaatgtctttattgagtttctccaattggtttgcagcactaatgaaagtgtggcaagagacatgtagtagaatgggagattgacattgtgctcctaaatcttaatttatggttcttccactttttaatgcatactgcctccagttggccaatttcagacttgacctttccacaagtggctcttaaacccacctttgtttttataggaagaaccgaagaaccaaaagggaggagtccgagataagtcaaaggaaggcttcccattatacatcccaacaaagaagcgaataatgaaatatcatagctcctcccagttccccacatcatttacttatggaagttaaggctcaaccctgacatggcttcaattgacatgaaagtggcttccaaaataaagactcaatctcacttttgctcagtacaaactggtgtatcattaagatattggaggacaggatggagaaagtcccacctcccacatcaaggtcagttacataaccttaaatttttgctaatttaatggggttggcaagaacttccatcaccatgtcaaagagatcagggagaggaggtcctcttgtctcactgtgcatatagctctggaaaattccttttagccacccttctaaaggaatagagaacttaatccttgagaggaaattgttatccatcgcttccagtaagctaagcccagttttaagctttacatgatgaagaaatgatcatttgacattgtcaaatgctttagtgaagtccatctttcacttgttgtagtgcaataagctcattagtaatcaaaggctcgtcaagtgccgctatagccctttgagatcgtgatattcctttgtattatttacaaattacactaatttgaatttcttgtagctcaaatcaccatacactgattttaatagcccgaaatcacaataagaagatcgtggaaaagttctgatgtatcttgcttaaatggtctgtttttgctatcaggctttcatccaattactaaaattaactgttactttctgcaagctttaaaaagtgtcagacattctgcatactttggaagcttgtaatggatgtgttatgtaatgctctttcagccattctctgtatgttaaaatataagaccaccttaaggaccgcttttaggtgtgtgtgtgtgtgtgtgagagagagagagaggaggatgggagaagaacagttttgagagggagggttttttactcaaaggggacagccggacatgcttttcactcccacccgacgctaaataggccctctaaagtcggttgattataggattccttttaaattagatgactcgattgatgcggcatgctacaatacgccaatcgataataaagcaattttagaatattgcgaaatatgtacatacggacagtttgatctttatcataagagattcagttgtgagcttggaaagcacatcttatgctatcattaacaaggtgttctattcttgtaggtttgcaa

SEQ ID NO: 14175 - DNA, 1013 bp, Aquilegia coerulea
  Intron number 9 from transcript AcoGoldSmith_v1.002910m (l ocus AcoGoldSmith_v1.002910m.g) derived from phytozome v7. 0 (chr-ID scaffold_130; pos 186992 to 188004 reverse stran d)
ggataatttttgaggtgaaatgatatgatttttttttcttttgctctgtcaatgatgcttatttcctattttagaatttcatatcgcctctagcctctaggtggtgctgatgtgtctggtttaagtatgcttattttttagtactgaagtgtgaggttatgcagttaccagaaatggattttgtataaaaccaattttatgttctgacatctattattcattgaattcgatgctagaattattgttttcaagactattagtacgctttcttcttctaaatctactcactgaacattcaaaaaaaagtataatctttattctccattaccctgagaagtactaacattatcttcttagtaacaaagtccacatgataaggcgttaaaccttgaaagcccctttttcatgattttagtatatataattatgcatccatgctgcttttgcttggggcccatcgctgttaagggtgatttatcaaagtttatcttacttccccttttgtagttgtgaataaataacagtctatataaacaacatagtgaaactctttgatggacatttagatcattggtgtgtggatagatcttctttcacttttttatccaagactaaagatacttttcacattcaagtaaattagctggcacttggaaagacttgattgtatgtttgaccttgtcttgactctcttgacatgcgtttgatcctggcaactgcatgtattctttatgcttctaccaacctaaggcacagacatatctcttacttttgaatggttgatatggttctgtaattttattgatcattactcttgttgtttgggcaagtctcccattcaggtagggaactacttattgattatctgtcacctttctgataattgagattaagtagtggagtataattcatattcatttcatggtttgactatgaactgaaaatatcttgttttactgatttgttttgtcgtaacagggagtctctgtgagggttcgaaggcctactgacta

SEQ ID NO: 14176 - DNA, 978 bp, Aquilegia coerulea
  Intron number 7 from transcript AcoGoldSmith_v1.006914m (l ocus AcoGoldSmith_v1.006914m.g) derived from phytozome v7. 0 (chr-ID scaffold_30; pos 2856343 to 2857320 reverse stra nd)
aatatcagcctcaccttgtttggacgcttgaacaggttgatcccttaatgtttatctatagtgcttgttaaagaactttcttcatgagaagtgttttgacatttttcaagcccttgttataaagccatatcataataaactgagtgattaagtttcagcgctttacgcgatctcgttaagcagccgaaataacttagattttttttttctggtatatcgatgagtaagagataaaaattgaaactacgatacactgataaataataggtgagactataattttttatttgttatgacgtattagcatttgcttgtccctggaataaaatttggatcatctgatacatcttcagagaatgaaagtatgatgatctttgttttgtggtacgacgaaaaaatttgttactgggaaatggtttcgaaaagcatcccttaatacgtactcatttgttttgcttggtttgaaaatatgatataaaataggaaggtaggtttcagataacctacaagcacaaagaatagagaaatgttacactgacaattctgttattgttaggattaaattctctctactccttaatgtgattgcatctctcaatccctttttaaataatgaaatataaagaaaacttgatgattcacaaatcacaacaaaggatttgggggatgttaataagtatcataatctccattctgcttttgtccccattgcctttgaagagagaaactctagactttgtgcatcagaggacttccacacttgcctagtttactgttttttttgtttttttttgtttttgggcgggagggtgggttgggggagttcctcaacctgcttccattgtgttttttcatccttatcttaatagtattaatcgtatattatttgctactgtcatgttatctttgcacacatgttcactgctaccaccatttgctccaggtcaaaagaaacattgaagaccaaagatatcaaca

SEQ ID NO: 14177 - DNA, 1627 bp, Aquilegia coerulea
  Intron number 7 from transcript AcoGoldSmith_v1.002554m (l ocus AcoGoldSmith_v1.002554m.g) derived from phytozome v7. 0 (chr-ID scaffold_2; pos 5244230 to 5245856)
ctctgcacaattttctaataattggaaaagaattggtatgtgatgcatcttctgcgagcttattagatttttaagggtttatgttttctataattggtttcattcaatttgtggtttatttgttccacttgcttactcttccaagtagtacttcacactttaatattgcataggatgattatgtgaaggttgcattgagtatatattagttatcagcatgtcagttctggagtggaaggagtcctgaaatttaaaacaaatgtgatgttcttttgttatttaattcactggatttattattatattattattattttggttggtggtgatatggaggggttatagttttgtaaataaccaaaatttaatgttagcggacgcatggataactttccatcattgcacgactaagggaaaacttaacccattaatggtggtcatagtaagagcttaccaactgactgatatattgtgtttttatatgttaattatgcacgacacattaaatggcgcacactcataggaaccagaattgagataatattaattctgcagagcaaccattagattttttttttttacaatactccctccgtcccaaattataagtaccttttggaatattctacttattaaggaaaatcatttattgtttgtctactaactctactttctaatttacccctatttaatactaattacaatgcctaactttttattagaataattactctaatctcaaaacaagggtagtatagacaaaagaaccatttaacttaattaatatgtattcaaaagtcaaaagcgacatatattttgggacaatctaaaatggaataaggtacttataatttgggacagagggagtattgtctaaaaatttgttttcgagccatactacacgtagcatcaacttttactcaactacgagtaaattctttttgtaagaaatttgtttccttttcctttttcttttactctagcttgatgctaaaatggacctcctggcatcttatactgccagcattatttcttgttcagtgaatgttcttgtttgagtagttggagtaaaaagtaaaaactcatagtgaaatatgatctgaattaccccatggcattctgttgtgatgaatatctctgttctgttctggcagacattttaatgctcgttgccagaatcactgtttggaaacatccattctgttagactacttcagagtaacaagtcagtcagttctgaagtgagaagttatctttgcattgtgttgtgagttttgtgattggatagttttggttttgacacagacgtgttgtgatagatggagagtaatgtggtaaacatttatgcatctgacagaaaattagtgatgatattataacctttcaagtcatttgcgacgtgggatttaagtactggttgttgaaaaccattaatgttctaattaaatctacagaataagttttaatataacacacacacatacacacacatatttgtatggttgggtgattactgatgcacttgtttttgtcttttttccttaactttccgttaatttggtaatcgtgtagtgtacttagattggttgctaaccactctcttacacttttacagtcaatttgctgg

SEQ ID NO: 14178 - DNA, 2120 bp, Aquilegia coerulea
  Intron number 5 from transcript AcoGoldSmith_v1.003746m (l ocus AcoGoldSmith_v1.003746m.g) derived from phytozome v7. 0 (chr-ID scaffold_44; pos 1447692 to 1449811)
accttttgagtggcaagcatatcccacctagccatgtatacttattctaccttattgaattgcattccactgtttatggtatttagatattgtttttggataaatgtgctcattatatctcatgttttggaacttggaaatattactagctgtgacaaaggtgttttgatgttgccaccatgttttctggagacttggaaagttttgaattaattgctttactaagtttctgaaaagtcccatgtttgatcttttatatttccttctctagttggtccatgtgtgtttataaccctctttaattagaatatatttgaaagaagattgtttctgattcttacttaatgacacttctctgaggattcttggtttcagtttatcaattacttgttagagtttgattgaaactttaaccacgaacccacaaataaacgtaggtacacaatacagagagaggggaaggaagagagaaaggaggcatttacgtatttttgtttatcgaggatgcttattttggatattgtggtggtctgttccaaaacctcttcacataaaaatcggagtcatattggagagagcaacacaggtcagtggagcttacgtaacaacttaaaatattttttcatagacatactcacggctctatttatgtcttggatgcacttgtgtccaatctatgttcatggctctgcatacaaacaaaaaccctgcagatgaatccatgagaaagagagatatggatgacatttctcaaatgtcattacttcagattatgaggccccaccccataagcaacatagtagcacgttcaacggatcatggatctggatacaaacagatccccgagaaagtgacattacatacatgtctgacatgcccttatctcagcttacgtggcctcacctacaaagaatataacaacgataccatctatattacagtaaacaaggggttgatgttttttttttctttccttctgaacatgtgtccgtccaaaggaggacatctcggccttacgataacgtctcgagtatataacccaataggaagatggtttgtttgtttcatggtataagcatctgatcagttgaatatgattgaaattttgtgggtgaatcaatcactgattagatgttgaccacacatttatatagcaatagttcaaaagaggtgctacctgatctgattatttgaacaattccacatagctgcatacttgctagatatatactattggatatgtcttgtgatggtaaactttcctgggatttgaggtgtacagaactgttgaactgaaatactgaacctaaggttagatgtgtgtatatttttagttttagaattacgcgtacacgccatgaggcagtgtacactagggtatataacaaggaacaccagccttttaagtttattatataaaagtgatagtttagaatggaacaaatttatttatcttcacaataatatacaacatttacgtaacaggtctaagtccagaataccgtgatgtgtccaaaagtagtgctgtttaaccgtggagtagatgtatctttaacctgtgactatatttggtcaacactaccaggaaaggcataatatatagagggctatgttgtattttctaattcataagaatttcaattgtttgatctacatatcgcgttatgataaaataaatatcgtttgaaactataatttgacgagctcatgttggtaatgaggacaattggaaccaaatgaaatgtaactgagagaatacatgattaagatttgtaccctccatccagaagttcttgattatatattgtcataattgccaagaacaaattatttgtagtcaagtcttagcttaactgttgtgtccaccacgatccatgactgtcccgttataattcattttcatgtctatgtcacatacctaaaggccatatgcttaagttttacctacagatatataagaacaaaatttgtgacctttgtgaagtttaccagactgttgaaatcatgtctggaaataataaaccgaaatttgttacctttatgaagtttgaaatcatgtgttgaagtaattgactgtttctttaactgttttcaggctcttgatttgataagaggcaaaa

SEQ ID NO: 14179 - DNA, 548 bp, Aquilegia coerulea
  Intron number 2 from transcript AcoGoldSmith_v1.018451m (l ocus AcoGoldSmith_v1.018451m.g) derived from phytozome v7. 0 (chr-ID scaffold_4; pos 8683012 to 8683559)
tgtcccgaacggtacccttagggaacatttgggtaagatcaatttgccacacacacagagagagagagagagagctctttttatttggcttgaagattcaattgtaggtgttattctgtgcaggccaacataaaaaaaatattggacttcaatcaacggttggaaattgcaattgatgttgcccatgctctgacatacctacatctatacgcaggtaaattaacgtgtccttattctgtggtattcttggttcagatcccagtaagatagaatccaaaaggaaatgatcatctttttgaaactttccattgccttttcaccttggtagatattatactggatggataaataattttttttttgatcttcttgttgttagatttgaagttatgatgtgtatgttgttattttttaattaaaaatatgtatgatagatgcatatcctggactggtcagatatcatatttcagactttaagatacttttctagttattcattgaatgataatctaggtagcacggactcggacacggatacggacacggac

SEQ ID NO: 14180 - DNA, 3159 bp, Aquilegia coerulea
  Intron number 1 from transcript AcoGoldSmith_v1.006016m (l ocus AcoGoldSmith_v1.006016m.g) derived from phytozome v7. 0 (chr-ID scaffold_82; pos 256625 to 259783 reverse strand )
tgcagtggtgtggtgttcgggtcgttgccgataaggtcagttttaagaaatgagcattcttatttttgtcacctattctgttagcaattttcattttttttattattgtaaacatttaggttatctaagtttgaagtttgataatgctttgccctgctattttaattctatattcagtccaaaattttgaatcacatatggttatttgatacattaatatagtaagtttcaggattgagaattcttgcctgttttttttttcttttttttaagtctttgtgttttgtttttaggttggtaggaaagctatctagatatatatatactttattgaagtttatatgtacaaataattactgattacttaaggttttggaatttttctcatgtttgtctctgtattgtttttcttcttgatttgatgtgcactgtgaacacttatcaattttcaatttgtggtttatagtacacaacttcaatggcccaaaatgttatcgtcgagaagtttttgatttaacctcaagatatactcaccttggcttgaaacttttgggatacttttcctttgaatcccaaaggatatccaaatcctcgcggtttagcatcataatgttggatcgtataaaagcagtgtaaacattatacaaaccatcataacttccttctctggatccaagtctaaattcagacactccaatacgacatctccttgaaccaagcattggattttgatcttaatcacatcacattccatctgcaaatggagattggtttcagtattactactgaaatgaaaaaaaataaaagcttacataaaatggtcaagcaaaacttttagctgtttgtaatgtcgtatgggttctttttcttacacatgaagaacatttgggtgtaaagcagctctcctttaccaatgaagtttcaaccgaaaattcggattactggtctacatccattatggtgatcaaagcttggaatagatcggagaacgaaagaaatatcttgttctgtaggtggccattatggagatatatttttgcgagctacatataattgaaggtaccgaagctgagacggggaacatctttaaaaagtgataaaaaaagctgtaaataacctttagtagcctcccagtgagcaatatcaagagtcctctgctcactactatgcatatttcatttagttgctccataccttcagctatatatgttatgcttgaagaataccacaaaccttttacaatcaatccatctcctctaagcaaacaattattaatttatatcacccattgtacactagttgttgttgttgttgttgtctgccaaggttttcctaacctaaaaatactgtcagtctgcttgatttatcattgaaaatcatattcctatcgcaactacacaatcatatggatgtgcttaatattttaatttctagagtttggtatttgtctatgctatgttatttctttttggtaaatagaaattaaatagctttaaattgaaaggtaatccatatttttcaattagtaacaggagtacaattccatattttcaatattagagattataaggaggtgttgcagagattctatatcatttgaataccacaaataacatttcattagaatattttatatatgaagttgaaaactcatattcaaagattatgatcaaacaacatatagtagccatatacgtttcctcgtaaaacttgatgtacgtactgtatattcttcaaccaaccctgaaaaacatttaatattccataaaaagattaagagaatgaggaatataattgtaacaaacataaggagaaggcatagagagattaccagtgaagagcagagttgttacagaagaaagaagattgcagtattaagacggttatgttgaaccgtggaaggaaggaaagaagagatatttgttattgggcccgtcaccttgttattgggcccgtcaccttgttattgagcccatatggtaaaaccgacacaaccacatcatcgaatcaaattaagttacagtggttgttcttgtttactgggaaatctgaaggaaagcaaatccacgtcagattttctggattttctccatttatcagggagtccgaatttgttccacactcttactctccaccagatgagtccacgtgtgttattgtaattttattttattttatagtatctgagattggtgggacaaataaaacacctagatatggagtccaaatttattctggaagctaactctccaccagatgagtccatgtgtactgttgtaatttttttttttttcaaaacaaattttattgataaaaatttgaagaattctacaaagttaggaacaagcgcgctaccaactgcgctgcaagccctttttgaatagcaaaaccaatcctacgaaatacatattcattggaatccgccgtcatcacattgttgttcatcacgttttgtaccctcctgagaagttcaactgcttctggtgctaaattttattttttttattgagattggtgggacaaataaaacacctagatatgggtgttgttaaccctagtgggacataaaaaaaatataaaattttttagagacatgtgtatacatctggcggagagttaacttccacaagttctttctctctagatatgggtgctgttaaccctagtgggacaaacaatttttaaaaaaaaatctagagacgtgtactcatctggtggagagttagcttccagtcatttaccttattggtttattcaactgttaatattcaagtgttaactatcgggagaatatgcaggaccacatattaactgacctggttcaggtggatagatgtgtgtgtcttttgtatccaatgcaagatgctgttgatattgatttcctagatgtatgtggcttttgtataacatatactagacacttcacaggtccaaaatcatacttctttttgtaataggagtattgttgttatgcttcttaaacgtgacagcagattatattgttggggatgagctattttgtcgtatatctatgttatttttttttatgttaaacactactgtgttcctatgcttacaataaaattatagactcctttaacttttaagagtctgcttgtttcaggaaaggactttaacgtcggtccccaccgtgtcaca

SEQ ID NO: 14181 - DNA, 1156 bp, Aquilegia coerulea
  Intron number 9 from transcript AcoGoldSmith_v1.000761m (l ocus AcoGoldSmith_v1.000761m.g) derived from phytozome v7. 0 (chr-ID scaffold_63; pos 440560 to 441715 reverse strand )
aggtaccctagttccttttgtttttataattcttttgatgatttcatgacatcctaataatataaatgtaaataacggtgtagagaactcaaaaagacttgatttttactcaaacaagaaactaagaaattaaagaggtatttaatcttaatcaaataaggattcaaaataccgaaacgaattttgcctagaataccgagtgaacctagtttgactgagtcaacccggttgggtaagacaacatgaccactcaacccattcctcaacccttgtacatgtcatatctattgatactttatatatttttttggtcataaagtatttgtaaagtattttttgtttttataattcttttgatgatttcatgacatcctaataatataaatgtaaataacggtgtagagaactcaaaaagacttgatttttactcaaacaggaaactaagaaattaaagaggtatttaatcttaatcaaataaggattcaaaataccaaaacgaattttgcctagagtaccgagtgaacctagtttgactgagtcaacccggttgggtaagacaacatgactactcaacccattcctcaacccttgcacatgtcatatctattgatactttatatatttttttggtcataaagtatttgtaaagtaattccatttctttttgcaattatgggtatttattatccgaagtacacaccatttgatcaatattaatagaattacttagtcttacccagatccattctgatttggtgtatataagtttcctaaaagtagttgattaggttaaacaagaataggtattgaaaactttcttaagtttccttgtacagttcattaatttttttttttatgcaatctgcttgtggtgatgaagggattttcttttggtagtgtaacatcattagaatgagagagactcaaacaatcctacatgttccactgtagggcagggaatagctcttttctatgcctataatagagattttgggggtagacctccattgattgtccttttctatatattcttaagaatgaaaccactgtacgaggagacaactagtttgatacaatcttaatacctctggatggatctctaacatgattttacataacaggaagcaccaatacttggaaagcctaccatattcac

SEQ ID NO: 14182 - DNA, 1478 bp, Aquilegia coerulea
  Intron number 5 from transcript AcoGoldSmith_v1.011449m (l ocus AcoGoldSmith_v1.011449m.g) derived from phytozome v7. 0 (chr-ID scaffold_8; pos 3614038 to 3615515 reverse stran d)
cccctgttgctcaggtttaattcccaactttcaacagcaacattgcctatttaatgtttagttttggttcacaaaatttgatcctcccacaaattttggttatattattctctctgaacttcgcaacttaatacacacattaatgaacaagatatgtgctcattaacttgcttatcaacaaaccacaaactatttctcaagagaaatatattttatgcattgcacacccaacctaagtttctcttattctaatggtgtcaatctgaggactcattacatttattagctattttcgcattactatggtttatttagtttcagtgcacccataatcttgagcccagtgactatagttgtaaaaatcttcatatgttatatgagatttttttctcagagtttggtatataccacattataatgtactgatcaggaagttaaaattatgaccatatatacctttcttctggtcaggtgaccttaattggttagtgcaagggacattagttctgggtaaagttccacttctttactcaggcaatagcacaaaaagtcagatacaacccaagagttaaaagcaatagaaacttgtcttcacttgcaacatagtacggttagagtcatctccttaatactgtttacacctgatcaagccaatcatagattgcttctccaggcttgatcgggtgagagtggaacatgctttcggagaggtcagcggacaacatggtgaagcttgttgggtaaccaaatgaccatgtatgttatatctggtacctcctctagaggaaaatgcaaaaatttacagaggatgccatgggtaccacctatgttaggatgtgacatttatacaagtttgggtctgtaaccctggttaatattcttttcttaactatcaagatataggaattgaagctgttataatctttgctgatttaattatcatttttatagcataatgaccattgtacatttgtactcaaatgacataaaggaactacacacaacaaggacaatcatagttcatttcattctgcatatacgcaatccttcacatagaatacatgttgacacaagaaatttccccattttgtatctgcattcttaactttgtgttattacttttaaaagctttggtccaccttttatttattgacataaaatagaatagcttcagttggattgtgtttgtgtgctgtactacctgtaggcaactgtagacatctattccagacttcctgttgatatttatgttaaaataacaattaagagtcaggatacctgaactatatagctccttcgagtagaatgttcttcaagatgatctattcttcgcttttcatggttcatgcttgtatgcatagtcatcttatatgaatgatttgcttgtccaaacattttttctcttcacgtctatttcaatctaatattttattattattattttttttttttttatttgctttatatcagaaaacagc

SEQ ID NO: 14183 - DNA, 3350 bp, Aquilegia coerulea
  Intron number 1 from transcript AcoGoldSmith_v1.011671m (l ocus AcoGoldSmith_v1.011671m.g) derived from phytozome v7. 0 (chr-ID scaffold_9; pos 3043956 to 3047305)
tcgaaccccgatcgatctcttcacctctcatctaggtcagatttcttcatcttaattctcaatatcactaattttatttaatttcgaaaaaaaaattaaaaaaactcaaattttaatgttagtataagtttttttagcgaacgatctctggtatttgtttatgtattaacgattagatgattgaaagatgatgtgtgatcaatttgtgatgttgggtatttgtattttattgatttgattatcgatttattaaaaagtttaaatttttaataaaatttttgatgttttaccttcttccttattgatgatgatgatgatgattgtgaatatccttatatatatatgggacttatgatctgtttcaaaacgcttgtgctacgattatgttctgggttgaaatttcttaactgctatatgatctaaataataaatattagtttaatctgatcaaaaagttatttaattaggatgagatggttgagctaggagacttggaggaaaaatcttaggaatacgtatttggatgtaagatgatgtaggtttagtttgcatgagagctgattgagttagtttgattctgtgacatgaaagcttttatttttatagttagatagaatgaatatagttgatgatgatgagtacagtagaaaagcgagatgaatgtatcttataggacgtagatgggctgaggtaatgaaggcagatatttagattttatgttaagcaatgacattagataacaattaatgggtgattgaagaatttttcctctgtccccaaacacatgatatatgtcaaggttcattaaaaccacttattcaactccgacacttcagttttaatcgtgtaagacactactgtggccactgcggccagcatttcagatagacgatccttcttgttgtaaatattatgatgacgaagtggattagtatttagtaaaatgtttaaggcgactgttaaagcaaaaggttttggttctcaatgttctttcaaattcagtgctactttgggcaatacttattaggtaccaaaatactataaacaaattttaaaatgctaggtttgggaatttatacgaaggctcttacagttttattagttggaatttggataaatttcagttggttagtgacccgttaactatatgactgcttgattgataacatgattgagtgcaacattctgggattcgatgtgcaaacacacctatatttagttttcaaacatgcacagacatagttagagaatgaaaggctattggacaatgatgactctcgcagaagaaccgctcactaaaaacaaatacaaacattattctgatccaatgaacttgaactgtaacctgccgcagaaaatatgctgtacatattctgtatttttgtaacttgctcaaaagtctaaagtcacttcattccaaatccatcagttcacatatattttgtatatttttcttgtacctaatatattattgcaggattatataggtttgtgtgttaaccttcttttgtgtttctcaatacaagcatttagtaatttgaaatacaccatcacaaactttcagtgcctcctacgccgacatttgaaattttgaactttgtgtagaagaaaaactcataaaacaaataaacatgaaaacagataaacagttgtttattgtaatccagtatgtgacacctatattatttttctagatattaaacctaccaccacacatgtctatattaccttaatattgccttcgaaatagaaaatatcttacagtgaacttgaatgtaaaaacctaatattcatattatcaccttagacaaaagtgcagctagtctccatattgttaattttgttcgttatgttaatcacaattaaccaaggggattatagaatacgcttatggaaatttataacaaaccttttgtgatataatcaatgttgtctttgtttccatcttatctagtactccttaggctagcctttctgctctgtttcctactgaaatctaatagctctgaaccagaactttccgctttggatgtaacttggtaattctttcttgacatggcctctttctcgattttcatcttttgttcccattaggtttttttgtctcatatttcatccatcattcttcaagtagaactgctaaaatgctgagtggtccagctacatgctgcttaaggacatgacacccctcacctcccatagtttacatttgcactaactgaaatttccaaatcgtaaaaatttaatctgaatatctttttcaaatcattgttgagttaggcgtaaatgtactaatcttgttgcgttcacacataagcatagtaagtttgatctatatggccaaacaatttggattttttttttttaatttctgttttaaacttctattcttattttatatcgcaatggaagtctatcgtgtacatggttacattgtgtctttagtctttagatattgggttttattgtgatcttttgtgtgtagtttggagcccacttcacttatatttttgtttaatgtaattgcatatctaccacttaaaaagttattgtgatgttttatgcttcaatataatgaaccttcacctactttgattttttggtaaaaaaaaatctcctacctattttttacctactttgattgatcctacctattttacatgcttgtttgtacctctcttgctttgcattttaggtgggtgaactattgaagtctctatatcggtaattcgatatcttgagtttatactttataggagtcttgagtttctatagaaaaataaattcttccttttccaattaaatgacacattacgtaatgctatgctggtgtgagtggaattctaaaatggtgggaactttcatagtttcattgtattgaaaatgaactgaacttgtatttgtaaacatttaggatattgtgatcaagatatatggtttaagtatctttcacatgctatgctttttgtttgaaggtatgctgaacctattcattctcatgccgctattggtaaacatatttcaatgcaatattatgtttgatgctcagtgattagaatggttggtagttttctaagtattactttactgtttattattttagaagtaaaagttctggttggtagtttttttagaagtaaaaaactaatgtgtgattatttgaactctgaatgcggcagtgcaagccgatttagagacattgaaattgtgggttgactgctgaccctttgccttgggatggctttgatattggttttaaaatttcttcggcaatactaatttcctgccttctttaagttcagattcttttgttcccctcataagctttgtttgcaaattaggttttgaag

SEQ ID NO: 14184 - DNA, 3994 bp, Aquilegia coerulea
  Intron number 2 from transcript AcoGoldSmith_v1.003938m (l ocus AcoGoldSmith_v1.003938m.g) derived from phytozome v7. 0 (chr-ID scaffold_8; pos 819211 to 823204)
gtcactgaagcagaggtaatcttatattaaaccttcattcatttatttataaattaattaaagaaaactccaagtacgacacttgccgtatacctctatatatttcaaatcaactctaacagttatgttcaatgagagtttattccctgtaagttaatctgaaaggtctcacacacacttggtgtccacctatccacttctctccctgatttgtaattttctggataatcaatggttgttaacaattgcattgaaattcgggcaaattcggaaacactcagatttaatcatagacattaagggaatcattatctttcttattgtctgacttagaggcttggatccatgtttgagatgttatggaaagcatgagtgaaccataggtgaaaaaatcgttttagtccggatatccgatctccaaaaaaccggattattccgcgaatatccgacctcccatgtcggatttttgaggtttggtaaattcaaatgtaccggaatttttcgcggatattcgcaaaaaattcggaaaattgggagattttctgcacttttcgtgtttttcttctgatttcgatatataaacttataattaaaagaaaaacatacattacaaattaaacacacgacaaatcatacaaggaagctaagacggaactattacacaagatagttttactcataggtgaaaaaatcgttttagtccggatatccgatctccaaaaaaccggattattccgcgaatatctgacctcccatgtcggatttttgaggtttggtaaattcaaactatgtgaatgtgcacgctcttgcgtgctattaaagattgagtaatgtggatatgggcctgggctactgtatctctatctgtatctaagccactgtggatatgggcctgggctactgtatctctatctgtatctaagccactgtggatatgggcctgggctactgtatctctatatgtatctgtatctgtatatctgtatttgtatttataagaaacaggtgtcaatttcttacactgccagcgagggcctcatgaacgcctcggtatgggggcgccatataaagtagtttagatgtaccggaatttttcgcggatattcgcgaatattcgcgaaaaattcggaaaattgggaggttttctgtacttttcgtgtttttcttttgatttcgatatataaacttataattaaaagaaaaacatacattacaaattaaacacacgacaaatcatacaaggaagctaagacggaactattacacaagatagttttactcataggtgaaaaaatcgtaaatatcgggcggatattcatagaacttttatatgtttacaatacatgaactaaacacaaacaacctcattacaactcaacccatagttttattttaataatcaaaataaaagacatgctaaccccagaatgatagacgccccatgtcaaaccgatgagcttcgagtcgcatacgtgtggggacgaactcagtacagtaatattcccatgacattgtttgctcatacgacctgaattggtcaatatgcatatcatatgcatcttgatccatacaatacggagcaaatgattcaaagataggaaatctcgagtattgttgaaccggcattaatgtatcggctgactgcacgtctgacccacttgtcattggggccaaccaactccctatattaggaaaccaagaaccactgtcatctggttgggtttggtaggatggtacactggaatcatcactttgggaggttcccatgttaccataagaaaaatgagggtaaacataggtaggttggatgttggtttgagaataagggcggttccacgaaccttgggaagaaaactggtcaggaatgttccatgaaccttgggaagataccctagatgattctgtttccgttttaggatgcggtcttttctgtcgaggtcgttttccttctcttggttgttgccatccagcatggtcttcatcttgggtggcaaaaagaaattgagactcccccgtaaaatgaatcgcttcttgggtgcgctctcttagtgaatcactggcttctgatcttcccctttgacaaccaacatctacgttttggtcaccatctccatcatcatcatcggaaggtgaacgtgaacgtagaactgatttacttctgaacaggtcactaccatcaccacgaatattgggatggtccccaacggggtcatcaggagaatcacggacgtcaaacattgtgtgtcgtggttcttcgggcaaaatattgtcttcgacccttacattaagcctcgcagcaatttccgcgtttaggatccgaggtgcttgatccagttcaagatcaagttcatcttcgttaacgatccaatccatcggtgcatcatccttatcgtcagcgggatacaattcagtcaggtcaactaaatctttgtcaatttctgccacccttcttgcatgttttgctttcagccttaagttgtagtggacgtacaccaggtcatgcaaatgttgcattgtaactgttgctcgcctattggaatgtagcatgccaaatgtgctccagttccgttcgcatccagaggatgcaaccgtttgcgagaggattcgtactgataatctcatcgaaaattctagttcggggggattaaaaataaatgtgttaattttataatcgaaaatttcataaatttcgataaatatcggtttttgccgaatatttcgtgaatatccgataaatgccgaccggcatggggtgttttaaattccatttatatgccgtatgccgtaccgatccgatctccaaaaaaccggaatatttcgtgaatatccggtcggcaaaaacgattttttcacctatggagtgaactaaggaatccctaacccttttggatgtcttagttccatgcaaaggcccatttagccagttagccctgttattaggtttttactttttaccatgaggaaaaaaaaattacatgagcatgagtactttcgaggatagcatgcatggtatattgatctcatgcccgatttcagcttcagctatataaggtcatcattgtctttttatatattttttgttgaagtatttcaatcaccaaaatttgataactaatagatgcctagagcagtgaacacctacaatttgtgcgataactctttcattttttatgttgaaagtttctattaatttaatgcctatgaaaatactttgctagatattcacacttcttttattgatcgttcactttaagattgtttttaagtgtggaccctcaaaatttgtatgggataaccttactgcactatgacttcctcaccgtcttttttgctcatttaattcttcaataacctgacgttgtggtttgcactaatcaaacttggttcgtcgacataatgtttatctgcgtacatagtttgcatgtgatcatactgttataatgctttatagttacctttgcatgttaagatcacacttgagtgttaattatatttgatcattttcccagtatgttctactaattgcaaatctaaattcatggataaatttttcagcatattcttgccattttgttgtccttttgcataggttacatctgatcaccctgtactcctgtagtacaatcattaatgaagtgtgagggttttccaactcatcaattaagttctgtttattctatttgataattgatgttgtgttgtgtatgttaaaacttgagttttaagtatgaatgtgatgttatttcctctaaatgcttacctggcaatagaaatatagattcagcgatgaattattccagagtctgtcaaattttcgtatgtttttttattactttcttttgtgtgtgtgtgggtgtatcgcgtgcattgtttctgacatgttgtatcattggtcagaagtttcatgcatgggaaagtagccttttacttagattctcaaaccctgaaatcatgattttctctttttgggctattctcaggactactttgcaaa

SEQ ID NO: 14185 - DNA, 1796 bp, Aquilegia coerulea
  Intron number 11 from transcript AcoGoldSmith_v1.000825m ( locus AcoGoldSmith_v1.000825m.g) derived from phytozome v7 .0 (chr-ID scaffold_44; pos 103325 to 105120)
atcagtatcctttccccgtgtaattgtgtattctatccaagatcttttgaggaacacgtgtgcgcgccgtgcacacacacacacactagtggtgatctatgccttacgacactaatgacagttggcacacacctctgacatgcttctggcatgccttgtcatgtcttcgtactgttttacgacgctcatgcagtttatttatttatttagaatttgctatccattagcatttaaatggaaagatctcgtaaagagcttctcagaaatataaattttgttgagaactgacgtgttggtcaattgctatgcttccatactaaattaaaatatacaactacagtacttttttcttctcagcatggcacattcttcaccacatgtatattgctgtttaatatcattaataattcacacttcatatccattctaattttcaacaacacatttctatatggagtggtatatattgaccgaccacatttagagttgagatttagagaagctgttgcggctgtttaattgtacttttgtgggcttccaggagcttccatattaatgaatataccatctctaattgtaaattcacttggacatgaaaagactatctgtatactgtccattaaactcttatgtcttttattctcttcctcttatatcctctgttgtaatggattcccaccattatgcagtgatgatgtacatcgattttttaaacctatatatacattgattttttaaacggtggggttcggtttacacaattatttacacagttttttactcattatcttggacgtagattttatttaatctaacgggtaatcccatacaaagtagtttgcaaagatttttagtctaaaaaattgggatcacaattatggcttaattaagccgagccaatatcatgttttcactctcctatcattctctgtatattaaccaacgaacacaaactcgaaattttttttattttttttctccttgaagtttcaattttctaatagattcaacaatctcactaaagccagataaaaagaaccactaaaattgcagaagtaactccaaaatatgtgagcaaacacttaatctgaattctgaacctaacgaaaaaataaaatccaattctttgatttaattttttcaatttttgtcaactgagatttacactcagcaaattattgaattctgtaggcatgaactttcatgaacttggtttctgctcatatgagttttgaaagcacatgttattgcattagtgatggtagatcagactcagacctcagagaaagagagaattttttaccataagagagacaaaggagattaagggggagattccgaacacatggcaaattattattaaaaaggtgaaaatataaaatagtggtatttgttattccttaatttaaggctatatttatatgccaactgcttgggtttcattgaaccattggataagatagggtggacgttcaggatcttgagtacaaatgtgtgtataaaatcttttgtaaaccgaaccccacccatatatatgtttctgaattttatattcttgtcttgattctcacatgcataagagaatcagaagtttaaaagaaattattaacgtagagaaatgtaatcattttttaccctaatactttgtatgtatgcctcactaatattaagcttttctggttaaatccatgcgatgcaagtatagaaggaacttattgatatgtctgcattttgctctctaattaattctttgctacttagatggattctttgactaaagaccaccagctatttga

SEQ ID NO: 14186 - DNA, 976 bp, Aquilegia coerulea
  Intron number 4 from transcript AcoGoldSmith_v1.013906m (l ocus AcoGoldSmith_v1.013906m.g) derived from phytozome v7. 0 (chr-ID scaffold_4; pos 6549249 to 6550224 reverse stran d)
tcttcagcaatctgtaaacttgttgtttggcaacagtaagttgtacttatttattgtcttttcaatattcataagttgtacttctttattgtcttttgtggtaatagttagcatggagagaacatttctgggtatgactataagtctataatgattttattacttaaaaatcttgctattgacttgacgtttagctgccaatgctttatcctcgatttgcaatttgaaaacaagctatggtttattcaagccataacccatagggcaacataactattatggtcttagttttttaatttttagtagatgtggtattaatcatctgtaaattgcttcaaaatattttggacaattaaggtttgtgctgagggagattagttaaaataagatttgcactgatggtttttctgtactcggtggatgtggacaatagttattctaattgttctatacggtacattgaacaatgtaccatattgatttaaattagaaacattttagtagttcagtttatcatccgcagaatgtttttttactttgatatacagtagtcctccatttgagaaaatgagaattatacaaggagctaaacttccaaggaagaatgaaaaaaagtaattggacgttttcatattctcagtagaatagtatattactgtagtggcgtttagaattaggatagatgcaggtcaaactaaggatactagcataacttaatgaatgtttcattctttgtgataattttattgtttccatttccatctatattatggccgtttgtagatcagatgtattattattttcttgttttcacctttcatgtttttgcatgtgttggaagaagaggtcgtggttgcttttgagttttgtcccttctcgtttgagatttgatgtgttcgttcttgtagttatcctgcgtcttgaagttaactttatacaattttttttttttttttttggaggtcaaggggataat

SEQ ID NO: 14187 - DNA, 1009 bp, Aquilegia coerulea
  Intron number 1 from transcript AcoGoldSmith_v1.002682m (l ocus AcoGoldSmith_v1.002682m.g) derived from phytozome v7. 0 (chr-ID scaffold_109; pos 339540 to 340548)
tcagataggaaaggaaaacaagtgcaacatatcaggtcagagtatgttccttttgtcactgtgcatgtgaattggcactgagcagaagaaaaagaaaaaaagaaagagaaggaaaaagaaaaagaaaaggaagatgcatattttgatctattcttttcctcttcttgttgtatgtgtgtgtgtgtgtgtgtgtgtgcacacgtgttagtaattatattggagggttgaatctggtacaattttcttccgttggttagtaaagagtgaaatctagtctgcgaactttaatatcattgagctgatctcaataaatagggatcaacagtaaaaaccttgcagtaattttcaccttgaaacaatttttttacctttccgcaagaaaagaaactataaacaacagatagtcagatagtaaaacaaactccaaaagttttgggttactgtcaaatagagggaaatgtgtcatgtctcatgcatcaactatgatcgaggaatctgaatgtcaattttgttgaattctgctacccatctgcatagtttaggagtaattatcctatttaaatggattttctgagaaatttatgaaggccaagtgcccattcggttgaaccacaagttgtctttggaaatgtcactctaaagcacatgtcctgtacatgacatgatggaaacttgagaaaggtgattagagagtattttctaattagagaggaactaattatatttaacatgtttcatgcatcatttggtttatggaatgtatgtgtttaaataataatcgacttaaaaagatgagatagagaatggttttgaggagatgggttttgtagtcattaagtaggtattacaaaaattgtccgtgatgttttcttattggtttaatagtaaaatcagaacttaacctgcgtgcttgacattagctgaagtaaagctcgaacttaggagtcaaacctcatttgttaatatacaattccgtttgacatgcaattctgtggtttcccacatgcag

SEQ ID NO: 14188 - DNA, 1141 bp, Aquilegia coerulea
  Intron number 5 from transcript AcoGoldSmith_v1.006781m (l ocus AcoGoldSmith_v1.006613m.g) derived from phytozome v7. 0 (chr-ID scaffold_109; pos 368932 to 370072)
tggctggacttttaacagcagcatctcctgttcaggtgttattctttctccatgctaagtttttgattgcttttccatggatcattagtggttaactataactatcctggatttgggtcgattcagatgtttatcttgtcctctagtctagactttgtttagttttatgcccccgtaattaaattaatctacttgtttgtctttgaggttcgaaagagcagttgtctgcttgggtgttgtaaacctgtatgtgaaaggtctggattccacttgggcttgcctggggtcacactatcaaaccataacagcagttataccctggaccaagttccacagatttgagaccataacagcctatggacagtaagaataatgaagaatgagaccaactcaccttggtactgtttggatcccgctcagacaatgtttcagatggcggattactttcaggagattagcttcaatcatgtgtttaggaaagcaatcaatgcgctgattacttagcttcactagggtgtgtcgagggaaacaatgttatattttttgaaccacctttagatgaacctctgtataggcatgtctgagatgatatgataggaactgaatatgtaagactataatttttgatcaatcaacaggtgggggtctgcctaaccccagcttaacttgcaaaaaaaaaaaaaaagttccacagatttgtattggactaaacctccttacactgtgatatggaccttatcagtatagttagatagatatactatcggcgtacaggacttccggtcgtttgcttaccttcaccttaagatgtactttgcaagtactattggcttttgggttaagatctagactgttgtgtggtttgacatttcttcttgtcactgtaataggctcttatgtgtacttagagttctacattttgtagcttttgttacggtttgcctttaggttgtctcttatttgttgatattcaagagagggcaacattgcaaaacatataaaatgaaggaaaaatattttacatattacaagtaaacttttaacaccgtgttggctgcaaattattatactacacagaattatgtatttctcatacaatttgcttttccttttcaggtggttgtgggtagttttaaagcgg

SEQ ID NO: 14189 - DNA, 512 bp, Aquilegia coerulea
  Intron number 1 from transcript AcoGoldSmith_v1.021976m (l ocus AcoGoldSmith_v1.021976m.g) derived from phytozome v7. 0 (chr-ID scaffold_3; pos 4672052 to 4672563)
cagtgtgtcactccttggactatttctgtggctaggtgagttagttgaacaattttaagatctacttttttgtttaattattggttttcatgtttttttttttttttggatttcgattatgtctatgttgcttgatctttttttaattaattttactcttatggcgttctttgtagatgtattattgttagatttattctttggatttctatttttttattctttgttggttatgtttggattagtctttggagatttcgtgtggagcgaatagtcattgttgaattggttatattacatgggttattttatcgaaattctttggaatgtggctaatttttttttttttaacctgatgtcatttaggttgttaattaatttacccacgctcatcgtattatgtttgtagatatgaggtttatgctatgagatctcttgatttgttgttaacatctgaactttgttttgtttccatagtggatattcgttgttgagggatccacaccataaca

SEQ ID NO: 14190 - DNA, 2133 bp, Aquilegia coerulea
  Intron number 11 from transcript AcoGoldSmith_v1.021454m ( locus AcoGoldSmith_v1.021454m.g) derived from phytozome v7 .0 (chr-ID scaffold_18; pos 2779974 to 2782106)
ctttccaagcaggtaatatgatgtttctagttgaaatttgtagaaatgtgtagttcttttattgttttcatctgttgcatgtactctctgtttatcttttctccaaaagcttgtaagcgagacttttatttgaaaaatgatgtatccatttgagttgtaatccattgtgtaataggctagaaagtggaacatagcactgggagcagaagagtaatactatcatgtgataagggtctgttagatctgtcatgtgaagaaattggagaataaattgatatgatatctcctaaaataatggttaggattctgcttttgttggacttttcatctcccaattctgtagaatcttgaccatctaatctcccttataaaagttcctgcacaaaaaccttaactggctgtcatatttacatactagatcctgatccaacctggtatattatcagtatctcaccgaatccactctagtccgatgattagcttgtttgcaacaagttttcgatactttcatagttcaaatgcgatgtgacgtgcacgcttcgcgcgtgggatgggggttggttgtagcagaggggggaaggaaaattagtaagaagtgacaaactgcttagtttgagagatttagaaagggcagtggaagagaaaaaaaattgatgtttagataatctgaaatgagcctgtagttccccattcgctttctttctatctgtttagatgtgtgtatatatggacaaaacctaggcagtgggcaatgaacaatctacttgatgatagatagccttcaaaatttacagtgataaaagtccatagtgaaataatgaaacttgcaactttgctattcaattgaattcatacgctacatacgatactgttatcagtgaattacaaaacacataactagattaaaagactaaacaaagagaggcaaaagaaataaacacaccacaacacgatgaagaaaaataactcttacaagattcaatcggtctttgtctatttgtctctgtacctctctttgatatctgaatccctactttcctctctctttgcatgcatggctctcaaatccctagcttgactccaatgtgcctagtggcatcacaaatggagcgaatccaaatacaacatatagttttatcagaacttaacttcaaaagaatctattcatcccatgcctatttccatttttgaatgacttggagagagcaagcaggggaggattaaagatagtttggtgcctttagattaggacagtgacactgcctactgccaacttattacccacatatatctgttgctcagtaattcatatcagacaacattgagggaagcaatgttggtggcttaattttttatttacttatttagttatatattggtatattgtaaaatgtttactttgatagagtagtcgactcttttgcacatgcacacacccacttctattttctgggttattaacttatttgtcaactagatctcatccaccttttatatgcttctatgttgattcctgttgggcgagtcctttaagttatgtgtttcttattgattgaaaaagaatgtgatatgcttatacttctaagtatagtataagtttttcttgaggtttcctggtcctttagccaacccagtatgatagctgacttagatacgcacagcacgaataagatgtcacctcacaaaaattttccacaataaagggtttaacttatcaataatagacataagtttggcaaatgtgaggggaactcgtaataatccataggcaaattattaattgggttcaaattccacaaattgaaattgagttgtaaatttttaagattttgttgcaccccagttaatagtttattgttgatatttaaagaagagtaataaaatatcaacaagatatagtgacattgatattttgttaacacctgtcctcatgtatgctcaatcattcccttgaaaactacacctttcatgcaagatgtatcattctcacttgtaattttaatcgttcccttggagctcacagttttgatgctgaactcattttgccatacaatctattgttgtttttggctgtctgttagtttcttttactagtctagattgacaatatttgatttatgttttcagtacagg

SEQ ID NO: 14191 - DNA, 1506 bp, Aquilegia coerulea
  Intron number 1 from transcript AcoGoldSmith_v1.002195m (l ocus AcoGoldSmith_v1.002195m.g) derived from phytozome v7. 0 (chr-ID scaffold_5; pos 1701871 to 1703376 reverse stran d)
ttcgcaaggtaataataataatgttttgatctgttttagcttcacttaaggagaatctgaacaagtttgaaatcaattttgttgtgaaattgagaatctgattgctataggttgatttaatttgttaatttaatggttttatacttgattgatctctctagtgctattgctattatatagtagtaactgagattgtagagtgatttggattgctttaaaagaatgtttaagtgtgagtgattgttttgttctttgaaattgtgcaattaagttaatcaagtgctttattttcaagttttggtgataattttgatcagctctgaaatgtgatattgaagaattttaggatactgttataaacaatcctttttttttattaggttatctggattagggttttacaaggcttggtctatccctaatagtaattatggtagattaaatctaaagtactagataggaacttatgagattaggttttcattcagatctcaaaaccctgcttgtaatggttgtcagaggtcgtgatagaatctgttgcatttttatagtcacatctagttttactgttgtaaaccatctattttactgttgcaaattatcttagttagggtggggttggtgagccattgacaaattacaatggtactgcttcaattgataatttgcattaatatattctgattgggctttgataactgctgcgaagagttcgattattccatagttgttcaagagatactagagaatctttgatgatgtctcatcatattgtgaatagattagtcatcagcccctattgaaatttttcttagtagaattaaaatgcctattggttacagtttggtctttgctttccatttggatcaacatactaggtacagaaagataatttcatcttctgcttgtgaaatttgcattacttttagagaataaatggtactccaattagttaacatgccgagttatattatatgtttgcatcagtgcttcttcttatatctttacaccagggtatgtaacatgcctcgtgatgaataaaggtaaaacaattgagggaaataaaatagtgttcagaaaatggtgtcttctcttaagactttaccagggtcaatcggtggcttaccacttttaggttgaaggatttggtgctgtaaccttatcaggaagtttattcgtgttttgtttgtttcacacatatttatcgagtttccctttttttttattattatgatatgcatccgagatcaaaatatctatccgacttgcttctcatgcttgtcaatttgtatgacatgtcacatattatgtttgcaatatcaaattttgaatgcctaatatttatttttattacagttgcatctattgacgtgccacccttggctactctgaaatctgtagattttccttttattgtcaatagttgtggtcgaaacttcatggatttctttctaaattttctttatcatttgacaggtatctggaccagtcgttattgcagacggt

SEQ ID NO: 14192 - DNA, 1191 bp, Aquilegia coerulea
  Intron number 1 from transcript AcoGoldSmith_v1.000664m (l ocus AcoGoldSmith_v1.000576m.g) derived from phytozome v7. 0 (chr-ID scaffold_66; pos 1262289 to 1263479)
tttccttacccaaggtgatggaatgaaactacccttttcttcttttttttgtttatattttgtttcatttgtacattcaatgcaacatcggctctaatgaattgggttctcttaggaattttgtcaaacagtttgtttcagtgttcaattcactttccttacttcaactatatacaataaaacctctgtataggaataacctctatataatcataaacaattccagtcccagcttgggccagttataaattaggaatactattcagttataattttttttggtcccatctagaagaaatttgcatctacatagttatattaagtatatattaacaataaaatatattacatattgagaaaaacattaagaaaaatataaaattttagacatttaatatattttttcattttctaacacttcccatcactaagttagtatatgtgcactatattttgaaattatattatatttttgaaactatataattattgaaattatacgataattttcttaagtaaaactctattaagttataacctctctatagtaataatttattttggttacttttaatcgtagataatatgcacacagttaaactttaatgaatttgatttgcctgataagttcatttctgcgctcaaaacaaaaacaaaatccatgttggtctactttttgttgcctatatacattaccgactttaggaggtccattatacttcgagtgggaaaaaatagtgtccctcgtccactttataaaaaaaaaaaactctcttctccaattctccttcttctcttcgtctttcttctatcttcttctctctctctctctctctctctctctctctctccatggaccgactttagaagggaaatcggatctctctccatggaccgactttagaagggaaatcggagagagagagaaggagaattggagaagagagtttttttttttcttgaaagtggacggacggacactatttttttccccacctgaagtataatgaacctcctaaagtcggtcgattaaagaagagttaccagataaatggacataagttcaaaaacttggatgaaatagaataagatttaggattgtgaatattggaccgatttatcatgattggctccttgggtgataattctgtatatcttaatttgatatatttggcagtggagctggtttgc

SEQ ID NO: 14193 - DNA, 1648 bp, Aquilegia coerulea
  Intron number 3 from transcript AcoGoldSmith_v1.005575m (l ocus AcoGoldSmith_v1.005575m.g) derived from phytozome v7. 0 (chr-ID scaffold_20; pos 1085971 to 1087618 reverse stra nd)
cccactaaatttaaactgtttacaggtgagaatttcctgaagtattcctttcatttgatagtggttcttttttccaaaaacggaaatctcatataagattcaatttttaattgaaatgtgctattaaagtcatctaatatagaggaattgttacacttaccaaacacaacttgagtcaccaaaaacttaaacctgaatgtggtttccaccagctatggaccactatcgttgcattaggaaatcaaacttgtatggcattagtcctcaagcttttttgacgaataacaaataaaatttacaattaaggttgtggagaaacgtactatctcaaatttaagtgttgtctaaaatatctaaagaacacatgtttctctttctaactcccataattagtgtactactgtacttgttgctaaattcttctttttgtagtttcactcaatactccacttcttgtgccaatcaacgatcccatcacagtaacactgtttgaagttgaacaacctctcatcattaaaagtaactattttttaccttcaacgtcaatcgaatttgcatgcctttctgcattcttatgaccttaacggtgagaggctttccagtaatagcaatcttgaggaattttgaatacaagttagaagttaaaacatctacgtattttgtaaagagacaagtaaaatcattgtagtactctatttcaaacaatccatgcaccagatatccaattgtcagtctttcacatatttgatccattcttttatagatatttatatgaaaggcataaacgagccattaaactccaacattccgagatctgtccctaaatttagagagtgggactaactcaaaatgacctttcatcttttaaaccagaaagtgatcctcccttttctccatagattatgttgctgtctttggtggacacgactggattgcttaaaatcaaaagcagtcaaggttccttcattattgcagaagaagctctgtatttgtacaaacatgttctttcacatttagtttcaatttttttccttcagccattaatacaccaggaatccaggatcttctcagcttgtgcttattcttgcacttttactacaagctgtagtttttgaatagctgaaacattcgagtaagactaatgttctgcagtagtggatatgtactcactagaagaaaatagaggctaaggatgactcataagacagtttccttactcaatggaactaatgcaatgaaaatgtaaggccatggggatgtaactatacataataagttaataacgtacgtaaaacgttctcatagaaagttgtaacgacaaaaatacctagaactatgatatgcatgtgcaaattattgtaagtcttagagaaggctataaggcatcaaacaatgttaataatgaatatcgttgacaaatatattgacaagattgaaagcagtagaattgtttttttcgtttaataactagttgtgagcgtgtatttaccctagcaaccagtattcattactggatttggccagctttctcttagaagtaccgatttagtatcatactatcatatcaagcataagttgtctacaggaatactagaagtgcctttctgtttagtaatgagttgtgaattttgcttgtctcaggctcagc

SEQ ID NO: 14194 - DNA, 1025 bp, Aquilegia coerulea
  Intron number 15 from transcript AcoGoldSmith_v1.020957m ( locus AcoGoldSmith_v1.020957m.g) derived from phytozome v7 .0 (chr-ID scaffold_6; pos 1259271 to 1260295)
agtgagtctgctcttgaatatagtattgtttgaaaggcttgctattttgccatgtcactgttatacattatcctttttcagtttaagcataatacaaggtaggaaagcacaatttaatccaagctattcttatctcttctttgttttaaaaaggaaaatgttgagttgttgacactatatcagtatttactaaacacaagtgactgttttctgattgagagtcaaacagtcgaatttaagtcgaatctgcatcttgtcaatacaatggtagccgtagccatgattttttgggtaaattattacatccagactcagtcgcgatatataaataaatttatggagtcgattcaaacagactgtgtagcgcaataaaaaataaagaaaatagaaatgaatttttattttccagttttggtgatttctgaaaagaaaaagtatgctgttttctggttgctcttctgtgattcaattgtttggctctgggcctcttctagtcttctggttattatcagaattgtctttgaagaagagaatttagattgtattggtaagctttggatttcgtgctccatatcaaacggatgatgctatggtcctacacatctttggtgatacataacatgattggtgttgtgcttttcgtactccatggttatctttcccgttgttgaccagaattaactttcaaatcatcagaattactcggttacatgattttcaattaatcagctgacatggttatcaatctactgtgaggctagaatctttatagcaactaacacaaaagagaacttcaatatacacggacaaatacattacgaaaattcatctgcttgtatgaatttcataagccaagcttttttatgtggtcgtacgatcatgttgagttgttgcatgttatcaatgcattttagctctagcatctgagttggtagttgtgtcaccctagtcattctcattcattttgagacatgattttttggcaaataggcttgtgtccgttggaaatttagaagctgcagtaa

SEQ ID NO: 14195 - DNA, 3071 bp, Aquilegia coerulea
  Intron number 9 from transcript AcoGoldSmith_v1.010254m (l ocus AcoGoldSmith_v1.010254m.g) derived from phytozome v7. 0 (chr-ID scaffold_3; pos 3989457 to 3992527)
aagttatttggtggaagatcaagcgttcttcggtaaagtaaaaccttttttagtatgtatagtttgttttaccctcgaatatgacttaagaggaagaaatttacgtcacctttatcttttgtatgctttggtctttaccccttgaccttgtcagactggtatgaccgattcaaggagagtacagtttagtaatttaccctcaaaaagtatgaaatttatgaaaatttgcctcacaatgtatcagcgattcaattatcttaaacgcactgaaatgctgtcattttgtcattatagtattttttgttttgttttgttttgtttttttgttttgtttttctaatttcttcttaaaatatacaccttagatgccaactagcttattccttgacgctggtaggacttttactagttgtcactaactcaccatatcctgggtttagtctgataatgttcataatttagtactatatcaccgcataacgccaaggtcatgacaccactagtcaattgtagatattactgtttgatcagtgacaaaaaattgagatcattctctcacgctcactgaagcttaacccatgtaccagaacttggtgtaccatcatgaaccacaaacataagatagtatccactcggtgcaacctcagccaaagccggacctatcgcggtaatctcatatgtccaaatgacaacttgtctaaccgcaactaccgttagcattaccattctttgattcatcgctagagaatgagttgtaaatgatggtgctaagattctaacagaaacgtggcttgctgacctatactctggcacaaagaatgtgatcgacattgtctgcccgtagttaattatttcagggcaagcagtgatccttggtcgaatattatcatattcaggtgctaagtaaggaggtgaaaatgattctaagctgagctcagttggatatcgtacgttggtgaagctgtaatttgtgtgaggattgctgcctgcaatcaaaatgcgcccatcaggtatcaaaattgcagatgagtggtacattcttgcggtcgaacctgctctcattagcaaaaacctttgattacttggttcatctgggcgatacacaagtggtatagtaaccgggtgtctgccaagctcccaaccagcagtaccactccttgctccatttattataatgatgtcacctgttggcagaatcagcatatcacccattacccgccgatttggcatctgctccatttcccaagctgggtttgaatctgtgacccgcaaccttccacacataggagtagcaagtacaaaggtaccacgtaatgcatttgcggcactaccttttggtgcacccccacatatcaatacctctgcttcaatgaatctaccagggttgtcagaaaaccgaatgggaagcaaaaccgatgaacctgagctaggatagtttcgaggatcaccaccaggtatctgtgggaattctctaacaatctgattacgcctgtaatcaaacaatattgctcgagtatttgcaaatatgaacaaatttccatttggtaaaagatgcaagaatggatatagattgttctcctgatcatcgttggtttctctcaagaaactaagctcataagtattgtcatccccagagcctttgggataaaattcataattgaattgtcttcgtccgcctacaataattatgcgcccatctggtagcctttgattagttgcataccaccgtcgctcattaagatattcaggatgttctatccaatcacaatcgttagtgatacatggagttaaagtacgaatagtgcgatccccatcattatatccaccaatttgtatgaaggttccatcagggagaacagcaccagaggaacaaaatgtatcagtttgcaccattaatggtcggtaaatattagtaccaatgtcatatagtaaagaatgagcagtgcaatcattcttaagggctatatcattagcatcaacacgacatctaccaaatggaagggataagtttgacgggccaaaatcggtcctatcaaacatgacaacttggttattatgtaagagttgcatatgcatggccgatattccaatgcttctatgcaggatacgccattctccgcctgtgaagatggatgataatgggaaaaattgacatcttactaaggggaggaaaataaggatcagaatgaagaagaggaagaggaactccatattgctttcttttacaaaatgtaaaggggagtaggaagttggagacttcttggtgattgtgggagttgttccttttgttattggttttgagagttggtgggcaagaagtgtgacatatgtgatgcatatataacactaaattttgttttctgtcacacttcttggttgattaacataaagaagacaatacactaatctcgaatcaccagattaagacacagtaggctataaatcagaaggcagatttgacatgattttgcaagagaaaactgaacaattgtcgatttttcaacaaatattttgccgaataaaactacagatattctctaacaagtttctaccaactagtgaagttgtggacttgtggtacttatgtggatggttgttgttgcagtatttatattggacatctgtgacttttcatctgtgtaacatttgtttcttaaccctctaaaatacgtaacttgcttgaaaatgaaaggagatagaatgcttgtgttaatattcgatagtatgccttacatgctagcctgagtctaacgtgtaaggtaattttagatttttagtgctgtatggctataattcttttgccagtcaagcgcaatttgacatgtttaagagatgaaaaccgaatgagtgaaaagattgaggaattttaccatgtttgcatttttactttatatggccgatgaggtagcggtactaaagtttctttttattacatgattggcctttattattttgtaagtcaggtaaatcttattaattctttcaagagaaactttcctaccttgtgcaataatagtcgtatgttttctctatcaggaaaaggaaggagtgggaattttttgagcccattg

SEQ ID NO: 14196 - DNA, 1512 bp, Aquilegia coerulea
  Intron number 3 from transcript AcoGoldSmith_v1.004828m (l ocus AcoGoldSmith_v1.004828m.g) derived from phytozome v7. 0 (chr-ID scaffold_95; pos 106348 to 107859)
cccttttcagtgctccagattatcctcaatttcaggtatcatcttgctctagtgaattctattttgattaatattggaactagtaaatagtacttttatttcagcagcttgcagggttttaaatgtagaattgctacagtccaagtatcttgatgttagattgctcattgatattcactgacttttcaatatcacttagatttgattattagcattgaaatgaaaagacgagaagtattaagagggaaatgtgatgaagaaagaaaatagaaagttcaaggctttgctgcttgaggttgcttttctcttacatttatatcagcaaggtggtgttaagcacatgccacaacttacctcaattacaaagttacaccagcaaactcactacagtattctttaagaactgaacttcaaaacgatgtcaatgttttgcgttcagcaagaccattctttgagaattctgtacacgactttgtttaatcattaatgggttaggctttgatagttactactatcgcgcaaaattttcatgtgattggtaaactgaacaaaagtttcattcaataaaatacatatgagacagacgatcttttatttagacttagcaacaaagatcacaaattactgaaatcccttcacacttctattaaggatggttcccaagtgttcatatagactacatgaaagtactgcaactgatgactctcgacaaaaggaattataacaatgcttacgcaacttataagcgtctcgttctgggctcaatcatggagctatttgattctacttaacccatgacgagtcactttactgataatgagaatttaagaaacgaaggaatgctgaaaacaaaagcttgtcatacacagacacactaccagtatagtcatcccttcatgcttcgtagttcgaatcactcatctcctttatcacgagtcctgaaaacatacagaatattttagtgaaactcactacagtttagtaatccgactgagaacagataacatgggaaattaggcacatacatataaagtagaacactgtgtcaatgtcggtacaacagatgagaagagatattgctgatggaaaggatgtacatatcctggaagaattgctcaagttggacaggatgtttgagttagaattacaggtagaagcatcgtgtgcagatgtagtagagcatatgtgtcgttttggaccacaattctcatcagaaacctgatgcccatacgttaattttccctgtttgtttcaaccttcaacaataacattttgtgtgtccagccttgtcaaaatatttacatttgctcattgtatgaccacatccaccaatatcactatagcctatctcaatatggacaataagaactttttgtcatgttataagttataacattgtttgcgggacatttaatgataattattttattcttcattaataaacctcaaatctgaattatttttctttactatgcaggctacagcggagaggtataacaacaagggggcata

SEQ ID NO: 14197 - DNA, 651 bp, Aquilegia coerulea
  Intron number 1 from transcript AcoGoldSmith_v1.012536m (l ocus AcoGoldSmith_v1.012536m.g) derived from phytozome v7. 0 (chr-ID scaffold_58; pos 1382870 to 1383520)
gatttttaagaaaatatcttgtacctcagaggaaggttattgggattggaatagtcaacatatagctagtaatgtgatcttctggcgcataaaacccttactgtacatagtgtagcggcacaatctttgtggtgagtacttagtaggggttctatcagtgacaatcaaatagcagccagcagtcgacatatgagccaaccgactgaattgtgatgggattacttctaggtgaattgtcacatatcctttggtatatggaccatagtacaaaatattgcgatacatcaatatatatcggttttctagaaaaaaaaacgatacgatatattcccggcatttaccccttggtgtttatgcaaagtatcggtcgatatttcccgatatttagattattttttttttttttggaaataatttgtttattccatttttagtagatatggttttttagacagcttaagataactcattctgctatttcatatctataagaggatgaacaatggggataaccattttcgaaggaacataaactatacttacatacagctcaagtcttctatgcatctttctgatttatgaaagttccattgattggtttccttaacatttgcagtgtggagctccaagtgtgctgccaacaatccaaca

SEQ ID NO: 14198 - DNA, 797 bp, Aquilegia coerulea
  Intron number 5 from transcript AcoGoldSmith_v1.004370m (l ocus AcoGoldSmith_v1.004370m.g) derived from phytozome v7. 0 (chr-ID scaffold_6; pos 8047528 to 8048324)
tacaatcactacaaagacaggttgaggtatggaggttcgaaattttaatgttattctactttcagttgaattatttggagcatgagttgaatccttctgttcttattccactttcattcttataaggtgtgggtgcttcatttaccatgttgtattttctcgtcatcatcaagcaacttctgttttcggcctgcctctttgcctatagcagttttacaggaaaataaaaggacataatcataatgattttaacattttaaattgctcaaatttcactgaatcagacatcccaattagatatttagtttggtgccgaagttgaatataacaggatttttttttttgattatcataaagaaaaatggctgttctgaaacactttgatacatcaaaaagacaaaaaaaaagtaattgagcactctattgcttggagatttggaatttgctaaaaaatcctgttctggtgtaaaggaaactttgtaatgttaatttttgttcagtgaatacaagtttgtacttccacatccaatgtatgtgtggaatacaagtttagtaaatacaagtttgcttaagtggtctttgttctcttaattatgcttttcggtaatggaactaataatatcttcataatatcatatcggatagattacatttctcatcttgataattgatgtcattattttaaatagaaaggagtttgtcagattcatcatattatttcttgtagatcttcacagctttgcctgaccaaaatttaataatctaatatgttctcttctattttccagtttttgtcg

SEQ ID NO: 14199 - DNA, 2576 bp, Aquilegia coerulea
  Intron number 1 from transcript AcoGoldSmith_v1.024725m (l ocus AcoGoldSmith_v1.024725m.g) derived from phytozome v7. 0 (chr-ID scaffold_11; pos 5804607 to 5807182 reverse stra nd)
aggaaagactaatttggaaccttagaagggtatgttctataactaatttctcagttgtatcttttgtttaaccaatttttacattaagatcaactaaactagcttgtggaaaaaatttaaagaaaaaagattattctgaagaaattcatatcaactttagtaattcatagttatgccaatgttatggtagctgttaccacctttgttgatcaatacgcacccctgtattaaagaaactcatagctcgaaacaaccttttaagttcttaaaataaatgcctcaataccaaagacattcctcgacctatgacccattttcttccttcccattaatgtggatgctgcggcgaaaactaccttagaagtttcttttgtaatgagacatggatacaataagcaagttagggataagacaaggatctgaagaggaccagaaataactaaatagagctctattcgaacgagtaaagttattgttttgggatggttaatctcgaaaactaactattatgtcaacctgggtgtctgtttttttgttctctcgagactccatttctacttattccatctcctcttctcctactctgcttctcctataaattctcttattgcctgaagagttatattgcaatgataaggatagaggaacaaacatataaaacatcaaaattttctcaaccaacttccttcttttcctattgatttcctcatgtttcattgactggaattcaataattttcttttacagtaacatactaacatcattctatgtaacaaaaggtattttcaagctacaaaaaactttgcttcactgctctatatacctaaccaagtttgaggtgcgtttgaatagaaaaggcaatcttccttgtccttaaattcttcgatcttctccatgtcccgtaaatgtttgttacttttttgcattttcaagtttttatccccttactcagggctagcataacaaaatctatctccagcaaggagaattgtaagggagctgcactaaaaaatgatgaatacggcgaagaaagaaagaaattctatgcataactcgtaagggataattaactgagctcacataagctcagattcctaaaatacaagtccctgcctgttatctgaagataaccaatctaacaaacaagacatctacattgctacaagtcttttgagagaagagaacctttatatgaaatctgttctattctgcatattcccccaacacatagcatggaatcttctttctcaaggagatgagaattgatctaattctcgttgtacaagttgtcatatgctcctttaaccttgacgctaccttccatgtgagacgtatcaaaattccgatcatccaaggagttttgtggactgtggtacatctactaggcataatttatccatcattttgacactttaacatgcatttcactattttgaaactcacatagaccatattggcaatagtacaatgtataacatgtgtatacttatacataggttggagcttttctctgagtggatatatcaaattgggttgactggtccaactcagacatcctcattgtgatccattttgttgttagtaggttctgtaaggagcgatacttttgtgtaacttaaatgtcatgggcatatggttctgcacgtccgcatgcatacccttaccatatgaaaaatagacccacaactaccctgtcagtatcaaatgggcaatgtaaaattgagttctttggcaactgcagctctggtggtagtttcatcaacctaaaatgcttgaatcttaataaaaacaatatgaacagtagttgttacgacccttcattttccttaatatgatgaaaaatacataaaccccatcttaaatctctacattgtgcaatgatccaggaatgtgttaacatgtttagagatagctattacttgactgtttttctcaggatcgttggcactaaaatttttaccaaaagcagataggacgatatattgttgttgacccccttgtttgttgttatatgtcttattactgatattaatcatatagggtagttcttggaaccatgtaggattgattttcatatctaaatgagcatgccattcatcatcataactgtacaattgaagagaactggatgagatgagcatgtccaatgtaaacatatactttattttctaatggagaatagttatcatgttcagaagtttctagtcttttttgtttttgtattttttaaacaatgtcatgagaccttgagaaatacatatccaattattacatattagtaattatgaccaactggttcatgtcaactgaatgatgagttccagaatttctctctcggataaccgtaaacttcttacatttggttaacaaaagaccaagcttctcctttacagagtctatactcttcttcactaagcatgaatcccatctatagttgttgaatgtctgtaatgaaatgatcaactatatttgtttagcttattttgttttaatggggaataagctatctgatgcattgttttcccctttttgttcatgaaggcaaagaagaaagttgcattactcctgcagaaact

SEQ ID NO: 14200 - DNA, 2307 bp, Aquilegia coerulea
  Intron number 3 from transcript AcoGoldSmith_v1.005348m (l ocus AcoGoldSmith_v1.005348m.g) derived from phytozome v7. 0 (chr-ID scaffold_18; pos 2325222 to 2327528)
gcccacttcagcaaattcaatctgctcttgagaaggtatgcccgtaattgtcaggtagtattaggctattatctttatttaaaagtgtgatgggtcattcttaatctagtagaatttttcatttttattcatcatcacctctgccaagtccattcatctcgagaatacatataatataaagaaattatattaggaaatgttttcataatcatacttttcatgtactaggctactagtaactgctgtactttgtaactgttaggaaatcaattctactagggtgtcatgtcaaagtacacatgttaacattttatgtagttatgttacatgataattataaatgcatgcgtgaatccatgtctgactttagacatcaggttctatatgttcagacttcagagattgttatctgcatgtctgcgtgaatccatgtttgactttacaagaattcaatttcaaaaccatcacatgcactttagatatctttctgtaggtgattctgtatttctgttagtgtaaatcatagcttctggcttccaacctccaaggtccatgtgatggttaggctcatcattttttatatttagttagttgtttgaagtacaaatgcatgttaaaactgctacctccattgcttatataatgttttagaagtgtacagtcgcattttctgttgtatagcaagtataacttggatcccctttttgatttataatttaataccaactgcacatatcatctgttctggtgcttctttaacattccatttacatttatagaaggtcaaaacaatgctagcccataaaagaaaaggatttcagctaaaaaaatgtttcttttagattgtgttaaagcggcttgacatcagttacaaatttatatttggtggattagctgctagaataaagaggtaggaacatattccccctccctagttattgggataaacgattgatgaaagtttattattttccttgtgaaaattgattttgagcgatttattttagaacttattgttaaatacttgaatcaaatactgtactgttttttaccactacaggatgaaatgcaatgaataaatttataaatgcaagatttaggagttatgaatttattaaagcatgatggaaaaaaaactatacaagtgaagaggtgtataaatcttaaacatacgaaaggtagaacagttttaattatagtctataggtatccaaaaaatttattttgatgctttttggatacttctttgagatggtctacaaaaccttcacaactgaacaaaattctgttttggcttatgatagtccactttcgatgtaccatgtttagcaacttcccattctgtgtttctgaaaataaaatattggtttcagacactttgtagcagtttgttttatgcttaagaccaaactccaagtaccaattaacaaaaacttatgacctgattgttagtggtgattggtgaaatatgtaagcatctttgaacatagcaatacgtttttaagtgattgattaattgatagttcccttagaaatcacatgaatttagttttagctctatatatagtgatattagtctataccttaacaaactgaaatgtttaagtttttgtagaaattctttaacattattgtgatattgaataattcatgatctgtgtttcccagaccgaaacaatagatgcttgaaagtacaagtccatgtagtacctttgggagggatttcctgttttgcagtatctatagcaaaatttatttactatgctaataatttttttctttgtgtttattgtcctgaacatatacctaatttaacagtttacagtcatcatggagtctcaaagagtaaactggtattgtatctctcaaagtttggacttttatgtttgtgtagatggcgtaaggtgccatttttgttgttcttcacagcattactaatattttaatgagatggttcattgtcctgaacataaacctgatacctaatacaacagcctacagtcagcatggaatttggatgagtaaattgttgtcgaatgtccttgaattgattagctctatgtttgtataaattgcttaagatacctttttttctacaaattcatcacactagcttaccattagtaaatatatttacgaatgccagttttaatacgctatctaaagttcgtgatattagcatgtgacgtgttgatttgtaaaggatgtctttttggtcctggctgtgactatttcatgtttcttaacttattcatccatatttgaacttcagaaagagattaagctgaaagaacttttaaagaaaaa

SEQ ID NO: 14201 - DNA, 1009 bp, Aquilegia coerulea
  Intron number 2 from transcript AcoGoldSmith_v1.011992m (l ocus AcoGoldSmith_v1.011992m.g) derived from phytozome v7. 0 (chr-ID scaffold_81; pos 484533 to 485541)
gatttctctccttcatcgtccgcacagcaatagtgagtctttctctctgaacttgtacttaaattagattgtttaatattcaatgcgtgtttttgaagagagggtagctttgcaatatcccaaatgatacttctaatctcaatactcgtcgtatatctatctattcatatggaatggaatgagatctaaagttgatcctttaatggaatgagaatgaaatatgaaggttattctgttcatttgcgaatttataatgatttttttttttttatttatatatctctcaaaaatcttaatagtttgggttgattaaattttatggatttgcttttggtttgggttattgaatgaactggtaagatagacttagaggtacgtatcaaagagtttgaattaacatctaaagtttgtatgtaggtgtatttgtgaaacatgatactccgtattaactgaaaagaaatgtgatcagtgtatagacaattagtttatagacaattagtttatagactgttaatcttttaagagtgaattctgtccaagttgtaagtagcattctttcatttggaatttttatgtgcttattatgatagatattccagacatgctataatttaggatatgtagattttgaacctctggttcttgagcataatgtatactaatgtagaaattttatgtaaatttgatgttttgaaaagttggaaaatgtatgcaacaatccagattagttgtattggaagaactgtaagtgttgatgtcaattcaggttatactcatatatggtagagtgaagagtgtttattctatagctaagataataaatatatataatgctaaactgtgtttgtattgtgaacctagcaaaaaaaagtgtttgtattgtgaagtaattgatcattgcaagcagagttataaatttttggtagagagtgatcctgatttatgtatctgactgtttttgtgtggtgttgcagacaaagcgcacaaagaaggcaggcattgtcggcaa

SEQ ID NO: 14202 - DNA, 1113 bp, Aquilegia coerulea
  Intron number 3 from transcript AcoGoldSmith_v1.001444m (l ocus AcoGoldSmith_v1.001444m.g) derived from phytozome v7. 0 (chr-ID scaffold_7; pos 7282486 to 7283598)
aaaattgacagaggaacaagctctgactatagctagtaagttgaaatggttctaggcatagtacaaaatatcgcgatatatcacgatatatcgcgatatttatcggttctcaaagaaaacgatacgatatattcccgaaattttcgccttaaagtatctgtaaaatatcggccgatatttttcgatatttactgctattttccgatattttctggaaatattattttttttcaaatttttttttttggaaataatttgtttattctatttttagtagatatgatgttttttaggtaaatactatgaaaatatacttccaaatttgattttatatatattttgtataacaaattgatatattagtcgatacattccatgtaaaatatccaccgatagattccaatatatcccgatatatctattttttggagatcgatacattagtcgataacgatattttgtactatggttctaggccctcattaagcacctataaacacacaattggcccaactaagacccggtttgtaaaattggccctcattaagcatttgtaaaataagaaaagacccatttaacgttgatattgtaaaaacggccctttcactaccgataatacccttctggtttatgcaaacaaatgtttgcattttatggtatgtcattgtttcgagtatgcaaacaaatttttgcatttaatctttatgtgttatcactgatgcaaacaagtctttacattttctagtttatcttgtcgtcgattcgagtatgcaaacaattctttgcatttacattttatggtttatgttgttgtttgcaagtatgcaaacaagtctttgcattttatatttgtattgtgactgatataaataagtatgtttatatgcaaacaagtatttgcatcagtcgaagggtaaactagtccataagacacggaaatcagcggttgggcctattttaccattagttccttaactggtccaatcttatatttccacaccttaattgggtccgtttttttttttcctgtgtttaatttgctagaattaaatttggatttatatgttgtattgatttgaaatattatttactcctaaattcgatactacagat

SEQ ID NO: 14203 - DNA, 3517 bp, Aquilegia coerulea
  Intron number 22 from transcript AcoGoldSmith_v1.000140m ( locus AcoGoldSmith_v1.000140m.g) derived from phytozome v7 .0 (chr-ID scaffold_53; pos 1371092 to 1374608)
gaatctcagaaggtacagtctttctctcttacccttgttttaacttggttacatgtagaatagtgtgattttctgtagaaagagtagtgacacctgtaaaattgctgtggttacatgacaaggatccatgtcgatacgtaactccagatacttgacactgctgacttattttcctttggaaaagcttcttctgatattctatctactacctttttcttaatttctcaaaacttcaactaactaaacagaaggttttgggttagtaatatataggggtcgcaaatgggtcgtgttgggtggtatttgtgtcgggtctatatcgggtcgcgggttataataggtctacacgagaatgacacggttgttaaacaggtcaactcaggtcaacccgagcacaaccctttatccaacgggttacacaatctggacacggttgacacgcacgcctttcttcttgtcttctcttctctctcaaccatttaagttgaagtgttaaactaaacccaaaacagaaatagctttacttaaattgaaaatcgtcttaattaatccttctataacttggattaatcttaaataacagcttcaattttcttctttcatcatcatcaatggagaattcaaattcaaatcaaggtacttgttcaaaaaccaatgatcttgctggtgcactttcaccttacgagaaaacaatttcaccttacgagaaaacaatttcacaaaatcttcgtttaaatcacaatcacttcaatacactttttttttttttattgtaaattatcacttcaatacacttctttatccttgtgctgcactgctgctaaaggtgatggatggggattttgcttttaagttggtgaagagtatgagtatggggaagtataagaatgaccgaatgagtatggtaaaagtttaattttcagattcaatttcttatgggagagatttgtttgttcaaacacgatatgacacgactgggtttacacgacacaacccatttgttgagtgggtgaaagcaggtcgacccattaatagcacggaccagataacaggtcaacccgaacacattaaataacgggtcgtgttcgggtcagttttgcgggtcgtgtcaaaaactgccacccctagtaatatagaggtaaggtgagtttagtttcagagaacttattccttagtagtttctagttttctattggatgagtgaaatgtcagttttgggttttcatgggtgggtatgtatagaagcatcatgctaatagtggaattgtggatataatatcagaatatgtgaattgttgagtcttgtttctccaaacacgtgctaagatgtaatagataggttgaacttgattgtgagtctgacctccaataggttatgatttccccttaaatattggttctatgagccaaacatacccctagtaacaactataagatgaaaggtgctcacacagaccagggctctttttaccacccctggaacccagccatgtactccatgggaacaattttacagaggtcatatatcgagtccaaagactatcctttttgtcagcaaaagcccaaccaaagggagctatccatgataaagatcctcaatagaacaaggaatcaagacacaaattacacaatcaaggcatcctacctgatcacgcagtccctgtaagtgtggtttgtaaacttccaacaaaatagaaactccttgatctctactaagaggtgatcctgattgtgtttggtgttatgtccttagaggtggtgccaacacaactcccttccctttctctctaattttttaaagggttattgtcttattaagaaaaaaaaaaaaagctacaaggaaaaaattaaaaagtagatcaccaaggcagccgaaggtctccaaaagtccctttcgttgtcatctgttgtcaagggcacctcaaggcaccagaagggtttagggtttgcacccgacaccttgcctctccgctgacaacatacttttgatgttggtgaagactattcctttccttcgaaataaaccaaatgtatacttttgggtcccgtattggaagtgtggtgttgcactattgcattcaggtaggaaggtccacaacttgatcaaatgattataggcatctgtctcaaactttccttgtcttgtggctgctaaagaacaagttctttaggtctttcttcattttttgaaaatcatagcgtggatgcttgatttgcgtaaggatcattgaaagttgtggaccatgattgttcgtaaaactgttgttcaacaagagaaagcaatgcccgaaagatttgagctctcccatatcttccaccaaaggaaatgcccttttatgtcaagtatggtgtgtgtcctgtcccacggtcccaggagctaagctgtgatgggatgtgtgtgataatgataaattgggagccaaggatcaattccataagagggactgactgaaaagatcatgcaaatggctgtacatggttggcttaccatatattctctgggtagccaatgtcttaaccaagatctgtaaaaaatgtgggaaggtagttgagatcaatccagcttctcttttgctgcagagataagatgctggtaaaatattgatcgagcataaaggcgagatgaatttgatttcacagacatttgaggtgggtgatatgagttgttggtttctaatttatcttgagatcaagccacatgatctgggttgggttttgccagtgaaagctattgtgggtgcagggggtaggtgtgaggaggatgctgacatggtcttttacagtagacgtttcaagaagatgaaggttactgtattttcatataacttgtttgtttacgagaacaaccaaagttgatcgttttgaatatgtctaggttggttcctttcaacaatcgacctttatcactatgccacttttgaaatgaacatatgaattatggtagttcaaaagtcgaagatatcataattgaacaacaaaacttaaaaaagacagcacattattatgataaattagctattttggtccacaaactttcaccaaattttcaatcacttttgttccgtttgcaatttggtctcaagtcaagtcatgagccatatattctactccaatcatttgagaccaaattgcaaatttatcacattattatgggcacttttaggcaaactaggaactcatataagattggcttgagtgacaagaatataattacccactattgttgtacttattgtgattaccatgcctgaattagatgcataacttagacttgttggaatgtgtgatttagttttggaatgtgttaaatagctaggcttataccctgaaggggcaaacccttcaaggtctacattctttcatctcaatagaaaattgttgtactagctctttcaatctcgagtttcaaagaatacactcatgcaccaccactgtcacaaaatatcaaaagtaattttctccctgtttattgttttatgttggagtacttatctatattttttcccacatagggagg

SEQ ID NO: 14204 - DNA, 813 bp, Aquilegia coerulea
  Intron number 1 from transcript AcoGoldSmith_v1.002698m (l ocus AcoGoldSmith_v1.002698m.g) derived from phytozome v7. 0 (chr-ID scaffold_5; pos 2252382 to 2253194 reverse stran d)
tcatcaaaaagaggtcgaagaagggattcaattctgtaagggtaacttcagttatattatattgtctttgttcttatcatcaaaaagaggtcgattgatatgttattaagaaacttgatcttgctcattgttttgttggtttagttccattttgttaatacagtttatatctattcttttcggtaatgtttcagtttcagattcttcaaagttttagattagattaaatgaaacttagatcaacatgatgtgattttttttgatagtgatatagaactatataattttttagtgtaaaaaatttcttgtttttttttttttttttttttttcggtttgttcattctgcgaattttcaaacaattatttttatttttgttattttaggttatggtatctatgccatgttgactcctaagaatctatctcaatgctactaatttgttattgcattcttttggattgtggacaagattgttttttttttttttttgttctttgtagtaatgctccattactttttgatcatgttatagaactatataattttttgttagtgtaaaaaactttcctgtttttttcagtttgttcattctacgaattttcaaacaattatatttataatttgttattttaggttatggtatctatgccatgttgacacctaagaattaatctatctcaatgctaataatttgttattgcatttctttggattgtggattagaattttgtttgttctttatagtaatgctccattacttttgatcatgatgcaggtgacttagaacccttctgcgttcctcattaccag

SEQ ID NO: 14205 - DNA, 757 bp, Aquilegia coerulea
  Intron number 16 from transcript AcoGoldSmith_v1.000779m ( locus AcoGoldSmith_v1.000779m.g) derived from phytozome v7 .0 (chr-ID scaffold_35; pos 482464 to 483220)
caaggacgcaagcctgagcagatcataatcttcaggtatagttgagcagtcttttctattgattattcacatctaagtagtcatgtcttctaatctagattacataagttggtttgcatggcttgccttctatatgttcttaccttttggagatttattactactataaatttagtataaatgaaaaccatgtgaatataaatagtgcaatgatttggtgaattgcattactgttctatacttctgtgtgtttgtgtaaatgtacaataactgggtttccttatagaacttattctgtgtttcaaaacctggtaatgtaggacaaaaatgtgagtgtgcacactgccacacttgattattgttttgagaaaatagttttaatatgaaccccttagccaacagaaagttgtagacgctgaattaattaacctttcatttggaacttcattaagaaatgggctgaatatattagttccctcccacctgaggcctaatttattccagttctaaaagtttcttgactactttctagctacaacatttgaatgaaagttacacctatgagtacagactttgttatcgtagtttttacatgtttttttccgaagtttttgctatcacatactaactattagatgtgtctctgttatcattttaatatatgaatgtttagtcttcaatatgaagactaaagcctctacttctttctgcatcccggaccttttatcttattaatacttgtggtgtgattgtaggg

SEQ ID NO: 14206 - DNA, 1094 bp, Aquilegia coerulea
  Intron number 3 from transcript AcoGoldSmith_v1.002175m (l ocus AcoGoldSmith_v1.002175m.g) derived from phytozome v7. 0 (chr-ID scaffold_14; pos 2740024 to 2741117)
ccacagcttggtctgttaaagaatttgcagtacctgtaagtgttggttgattttactcatgtatgctgctttagttccattgtaggagtgtttacatttgaagattgcttttgtaaaagtaggagattggcattgaaagaatcttacaataagagttttatccaactccaacaaggttacgttgttagtttcaattaaattagaaatgaaggattaagtcaccagctataagtttagatagcattcggaagtcagatgacccatagctggaaaggaggtcaactgccatttccttagctagttagtgagcatttctgtataaggggagtggtaggatcagaatcacatggttcactagaaagcagaaagaggcacatttatttatacgccctctttatatcggactatcttaacattatttgctctgctgtcaaaagcgggaataggctctaggctctcaccccatatgcctcacccttaagggcacctagatttgtgtctagtttagtctggtgacccttgatgttgcctaaactcattcctaacccgaggctcaaccccaaagcctagccagtgccactgcattactgttagctagatctgcaaataaatagcagatcttaatttgaacaactcacttactcttgatgtctaatcaataactagatgaaatctaatttgataagcatcctaatatcctcaccactttgcaaggtgtgtgattcaagacgatgagccacattaaaccaatcgtcttctaaaataaaatagagtgggtatgcattgatgtccagaggtgttcatggtagttgaaaaacaactcgttctcaggccactcttgcatctctgcttgaattagacatcaaattggggcaaagttgatggagtggtcggtgacctttatttgtgcataaattgtcatggtgtagttgaagtgaagataagtttgtacaatatagagaaatggagtgtctgcttgctattttgaatttgttaatgatttttttttttcaggacagaacttcaaatccattttttcttacctctttttctttacagggagctctacagtaataacattagtggaataattc

SEQ ID NO: 14207 - DNA, 705 bp, Aquilegia coerulea
  Intron number 8 from transcript AcoGoldSmith_v1.026881m (l ocus AcoGoldSmith_v1.026881m.g) derived from phytozome v7. 0 (chr-ID scaffold_37; pos 74267 to 74971 reverse strand)
aaaaatgtgaatatgatactatcctcatatctatggttacatcattttctaattctgcagatgcttatgtacaagatcatgtttagaatctgctaaagtaacaaaatcgctttgtaacaaactctataccctcattcttctctgtacatataagataatataacacacattcaggtgttgatgctaatagcctaatatgcttcaatttctgttttagatttctgtatctgtgtagaggaaagttaacatgaaacttaaaatgacatgacagttttaaatttatgggagcaaaaatgatgaaaattgaaagaatcgggagacaaaccaaccaactagggaaaatgttttaataagatctaaaagctatcaaatgttttagtactgccaactatatctgatacatctgttgattttcttataacacagctttgtcattattgccatactagcatatttaaaatttagtattacatgaataacaaatatgaaaataggtttagccatcactattaactactaaatctggttgcttttatggcatggctacagtgttcaaactttaggcctcaagtaccttcatctcttgtctgtgtcttggtctttgcagaacctttaacaaaaatcgtcatatgatattcttgcagatgtgaccactgactttttaatatccagattgatttgcttttgtcttgtgtgcagattcac

SEQ ID NO: 14208 - DNA, 1063 bp, Aquilegia coerulea
  Intron number 2 from transcript AcoGoldSmith_v1.003322m (l ocus AcoGoldSmith_v1.003322m.g) derived from phytozome v7. 0 (chr-ID scaffold_3; pos 3041159 to 3042221)
ctccaggtctatctgcggtaatttacattgttttactgaaagtttcttgcttttttctttttcttgatacatgtagcatcattttcgaattttcatttctgatattcaatacaatatccaaaagtatgcccacttgaatctatattacaacaaggaggttttaggcaggggaagaaagtaagacgggcaagaatgtgagatccattatcgaaactcatcaattggctcaatggatggaaactactatacaacttttttcttgcttaggagtcaggcttcttattttaaacttaaagatgtgaatttttttttctttacatttcagattttactaaaaatggtattatcgagaacaagtttcagtctgttatctgttatcaatcatgaatataaaattctaaaagcaaactccatccaacctagtgtaaatagtgttgaaaggcactttatttggtatttcaatatatatagaaccatggaacggtggtggatcgacattggggaggatgggggtagaagaggaaggagagaagaagaggatttgagagagaaaggaagagaagaaggaaggggacaaatacagaattaggaaagtgaaaaggcatggttttgataccacctgactctaaatggacctcctacattggttgtaatgtattccttctaccatttgtaagaagaacattagatgacttctctatgatttcatcatggtaatactactgtgagtacatgattcttctgatacagtgtacagttatccgtttgttctagcacatttcaaactttattctgtaattgagaagttaatgagcatcatgatctaccaatactatcagtgtctaaaaccaagaattcttccatctcttaaaaaagtctaaggtagttgttatattcagttcaatggaattttgtgaacatttctccattgattctattggattttcagattctcatttctctttgtcaactagcgatcaaattcgtatgctattcttcagtccttgtactactcctatcagactgtttcatcgtttagctcttgtgttgttctgtttacagg

SEQ ID NO: 14209 - DNA, 2834 bp, Aquilegia coerulea
  Intron number 5 from transcript AcoGoldSmith_v1.002282m (l ocus AcoGoldSmith_v1.002282m.g) derived from phytozome v7. 0 (chr-ID scaffold_2; pos 2759534 to 2762367 reverse stran d)
aaggagctaaggtcagcccaaatcctttgttgcttcaagtatttgtagctgccaattaataatctttcaataggtaaatttgatgcatatgcataaagatagcatgtgcaaggcacatgcctcataattcctgcagattcctatatggattagaacatccctagtagtagtttatatttactttgcttttctagtgtagttaggattaggtttaggctattataaataggggattgtaaaccctattgagtaggttagattgaagatttgtttatgtcttgagacattaaattcgtttttgtgaagaaccctagtttttgggtgttcaaaccatttatttaattggtgttcttattattgtttgcttccgccgatagtattacatcaaaattggtatcaagagcttgttttttctgggtttagaagataaaaacctgattttttttacaagagccgcgttcatgttggtgatttgaagatgggttatcgtagaagaggtcaaagagagttttcgccgccgtcggatctttggagtttacaagaatcgaagcgttataccgattctgaatataaaactcccaactttgatcctagccgccgctttcctcttccaagaaggtatgaacctcccttttcctctcgttccccttctcccccacgcaggcgacgtcatagttattatgacaatggatattattcccaccaccagcaggacacgcaccctcctcgatgtggttttcagcaacaatatgttgcttatggtgctaaatattcccatggaaaccgtccaaagacttatgatcacgatggtcttcgtagtcgcaattctaaggttactctgtatggagaatacccacactatattgaatctgaaatcgattctaagagtgatgagtccatgattgattatgaagaagatgagttttctgacggggaaagttattctgaaaataattattcagatgataatgattctgtgtgttgaatattctgatgatgaaactagtgcagaatttgagtttggtgatgcccccgctaacaagagtttggttgcagcccttgcaccgtcaaacctctacacatccacctcagttgttcacccatcacaagtttctaatagcgacaaccagcagattttactgctgcagcagcctcattatccagatgatgcctccatgacgtcaccaagcatacaaaaaggtttgaaggaacttttaaattgctttactaaattaaaaagtcaatttgtgtcttttaaggaagaatttgttgaagaagagaaacgacttgacaaagaagcggagattaatttcttactcaacatgtttgaagaagaaaaatacgtcactcgtactcgaattggtggtttacaaagttacaatcttgttgatttctttttcgtttttggtgatgatagtgatgatacatctagttttgtgtctcttgagttagaagttgcatgtgtggatcaagtagaagatttgattgaaaaatctgcaagggagataaataagaagttctatttgttgcccaagcaaggaaacctggttgttgtccatgacaatggtaaagaggatgaacgttctcggaatttcgctcatcactcccatgaatcgatgaattccattgattccgaccgacaaattgatgatttttatcatccccacaaattccgtcccataaaagtaattggtaatttgtttggtggttatgttgatccttatctattccaagatgagaatggattttctccatggagggacaaacactttcaattcttatttcttgacatgcggttatattgttccaatcaattgggttgtcctaatgatgcacctatgacattaatgtctatcattctttctgcgagcaactatctggggaagattcatggccggattttctgcaccaacgtaaggttgagtttgatgtacaagagtcattttgaactttggaggatgttagtacacaaactcgagaacgagtttttttcaagttggggggatttgatgcatatgcataaagatagcatgtgcaaggcacatgcctcataattcctgcagattcctatatggattagaacatccctagtagtagtttatatttactttgcttttctagtgtagttaggattaggtttaggctattataaataggggattgtaaaccctattgagtaggttagattgaagatttgtgtatgtcttgagacattaaattcgtttttgtgaagaaccctagtttttgggtgttcaaaccatttatttaattggtgtttttattattgtttgcttccgccgatagtattacatcaaaattcaagttaataaaagaaggaacaatgttgatcagcaagctgaatgaagatttaagtacacccaaaaagaaagtgtgttaggcaattacgtgttatcaaacattgttgttttactatcacataaataaatgttgtttcgtttcgttctcattaaaacgatctagattcttatgttggggtgtcattctatctcaaattgttttgaagtgcatgcgtgtagtgctgactacagtatcaaattactcttttaatactcagtttatactcagtatcaacctcatctactaagttgtaggattttggtgtctgaaggtagtgtaatgtagggtctccgaattttggatgttgggagaggagcctggccaaagaattggactatgttcccagtattacattactcttttaatactcagtttatgctttgctcctttgttggtgtgtcgatgcctgctaaacaacctttgtagttgcttataagttagttataactaaatgttgcttcctttttgcagtgttt

SEQ ID NO: 14210 - DNA, 1306 bp, Aquilegia coerulea
  Intron number 3 from transcript AcoGoldSmith_v1.008591m (l ocus AcoGoldSmith_v1.008591m.g) derived from phytozome v7. 0 (chr-ID scaffold_17; pos 2541441 to 2542746 reverse stra nd)
tttctcttttgctgacatcaaatccttctatccaggtatttcatgttgcaattatttagacatctacgtatgatactatgatacaacaaatgtcaatgcaaaatgacaagtgtatacccaaaaaagagaaaaaaacagttaacagtgtacataaaaaatatgtagtgcagaagatcttcactcatattcaactcaaattttcaccttccattaattaaccccctgcatagctatttgtgatttggtcaccagatctatataacctcaccctctatcttcacaagacatgtccaatatcgtaggcatattttggttctgatctcaatttccgctgggcttacattttttttttcccaaagatcttgcgattttatcaattcccatgctacccagactgctgcaataggaaatattattcaatccacttgatcaccaattcaccatattcacactctcgcagtttgggacaattcaagggtgccaggagtatcctgcttatagcttatttaacttgaggttggatcctggttatgaataatagctacgaccttcaatcaaccaaggatgatggacttgctgaggttcttgacaaatttttctatccatctagaaggtcgctgcccctacgtggcgatgatagaagtaggagtcatttcaataggcaggcatgatattttcaatagattatcttgaacatcaaaggatgtattttccttgggtttaagcaggttgagacttgggccatttcctccttcagtttttatctaaagatagaactgtgaacttgtgaagtactagcgtagtttgtgcttttctttcttgtccttggctcctcgtttccatttctctggtgtcttttatatttaaaagaaaaaaaaaaaagagtataaataactgcaataggcctcctcttatggttttactcaaacgaagtattgtgtttgttcaaaacaaggtagctacaaaaactttgctagagatggttttatgatatctttaccaaaattttgtgtttgttcaaataatgtgaatctaaacttttggccttttggggagtgtcgtgagaaaggggtttcttagatattgcaggaactgttattacaaaaaagcattctctgaaaaaccaattttgccaaaaatggaaagaaccttaaaatcttaaataataaacattagaggcgatcataagtatgaaatatgcatattctaagcagtagtagctagtaacatctgatgaaaaaagtgactcatcatggtgtttcacgctgtagtacacagcatttgatcagctgaaaagaaggttatt

SEQ ID NO: 14211 - DNA, 1902 bp, Aquilegia coerulea
  Intron number 2 from transcript AcoGoldSmith_v1.000823m (l ocus AcoGoldSmith_v1.000823m.g) derived from phytozome v7. 0 (chr-ID scaffold_41; pos 292379 to 294280)
attgtcagaggttgattgtaaaccaaaacatccaggtcagtatcactcttgtatgttgttgtgataacaatctaagcttctttggtgttttgttactttggatttcttgcctgcaaatttgtggacatttatggcttagttagcaagaaggatcttgcttaaaacttgtgtcttcctaactgataaccggggacttaagtgaaatgaactgttagatccgtatttttctctgttaagaatttttttatagacgaacagtagacaaagttatgtccgaaccctgtcaaaagttgcatcatctgttgtgtagtggccattagtaagacagaaccataggaataatgacaaagattttataagtggtctactggattgttgcacatcagcatttgttaatgattcttggtgcacattatacctgtcaaattcaccttttgcagacaaacattgaagcatttttgtgtatgctatgaaaattgaagcaaatataatctaatataaaaataattaaaaaaaacaaatctccaaccacattatgtcttttcaatgaaaaactccatttgtatcttggagaagagttgtgaagcataattttgttcacttctatcgttttggagctaaaagcttggtgtttgtagtcgcattgcttgaccacacaaaggtcataagagttttgttgttgaggtgatccttaagcgaagccaattctatgtagtttatgatgaccatttattattgtggtggtgggttttgaacccaggaatgttgtgtaaagtttatactcccactcaactccaccaagtaatctagttcacacctgccagtaaatagtttctatataatgacaaagtgatttttccatgtagattggtggataggtctgagttgtagatcaataaggccactgcaagaaattatgcatctatattcagtagttggtttaaagtttgagctgcatgaataagaaaaatgctttcataagggtaataataacagtagtggtaatgcttgaaaaaaaaatctcatatgtcagttttaaaacatctgttattataaagctattaagttataaaaacctatttcaaattccaacaaactctagcctaagaggaagcatttctacgagatccaactttgactatgttctggatgttagcctgttaggaaattttggttgtgtagctactagtattccctaggtaaagttaattgtttactttgcctttggttccatatgttgtaatggagaaatacacaaatgagacaatcatcaaagagtatcatgaatgctctttctaaagtcataaaaggattcacaagaaatggtttgaagtgttccacatattgtagtctttttggtgggctgtaatgcgtgcatctctttacaggatagcttcttagcatctcttacctaagaagaaatcttttgttccgcgatgcacctaattgtcaaaactgtgaggcttggcaatcgattttgaccattatattttgttgagatacaagcgtatgccctaaggcataaattatagttactccaaaactcacagtttttcctccaatgtccattccactgggaagcttttctcataagttatgggaatgtcgttcctcaaaagaatcggcaaaaacttgttttatgaaaagcctactactcaggatataaacttttcccctacaccccttggtttgtactgtctaaacaatgacacaacacagcacagttagtgtcagaacatgtcacctaatgcgtctctaatttttgctgttgctgtttttgtttgttatgtatgacctcaaattttagtttcagttcaatacggtctaaaacaatttgttgacaagaattagtttgttctatctacaggtagggttaaaatcacgtggagtttttggtgggtt

SEQ ID NO: 14212 - DNA, 1106 bp, Aquilegia coerulea
  Intron number 4 from transcript AcoGoldSmith_v1.015128m (l ocus AcoGoldSmith_v1.015128m.g) derived from phytozome v7. 0 (chr-ID scaffold_60; pos 873537 to 874642)
gaggctttttgcgaggagcaatccattacttcaaggtaccttttcgtggattccgttatcacttatcatcagtggggtaaatggttaatgtatatagtgggcttgcacattcattgcaagtgcacaagtgttttttttattctattcatttaatgattgagtggaataatcatttgtagaaaaccaaatcatatatcctagattagtcaaagtagttcaagaagtcaactatatatagttttcttaggttgtaaactggtttgtttcttgtctttattaagagttacttctattggaacaattattataagttctttaagtttatatccatcatttttgttttaaagttgatttcgttattttttgcctggttcccaaggtaccgaaatttcctgaagtattaaggttcttcaatttcatacttttcaacttcacttccaaaaatttatggctgcttaatcagaatcatacgttcattttggctctagctagtgggggaacaccatatctggtagtgatatttgttaagtatatgtgttggccaaaaccatctgccagtgaaccacatgtataaatctgtactcttaagtatattaaccatattctgttgccgggtacatgtcactctaactataattggtgggaatggtgtttcatgagacatgaatcaggatatgaaatgaataactgagccacacaaaatcaaagtaagagcaaagaattaactacaccaagactagtggccttttcactctttggattgcattgttctacttcatattcatatggacactcattggactggtgttccatattgtcctaatgttcttaaaagaaattacatatagtatggatgtacaaattaaattaaaggcttaattatttatctcttttctgtgtattttggctagtagtttcttattcattattatttagtgtttttggtctataaacgttaatttctccaaaggttatcttgcactattaggctctgagacagtactcgcttgggacatgtttacattactgctctcgaagtattactatgacctcatttcttctgcctattagattgcagttgcgcttgcagttgctgcaattcctga

SEQ ID NO: 14213 - DNA, 1678 bp, Aquilegia coerulea
  Intron number 2 from transcript AcoGoldSmith_v1.006903m (l ocus AcoGoldSmith_v1.006903m.g) derived from phytozome v7. 0 (chr-ID scaffold_30; pos 1063570 to 1065247)
ctagttaaatatagataagaacaagagaatccaaggtttgcttcacaaactcatttcacttttttctttcttggtaatcatacttttccgtaacttttttttagtgaatgaaaacctaatgccaatgtctatcaattttgacttcattttggtggtaaaggaccaaaacaatggcctaactcaaaatggcgcattagtagaatagtgggtttatttgacatttgaaggaattgaacaaagaatgttagttaaaggttttaatcttcttggtgcactttcattacccatgtttcaaagtggcttacaattcaactcaaaaaactgagaaaatactgcatttgatgaaattattttagtaggattaaggaatttcaccaaacttgaaattggtaatactccactattttcccaattatgaaattggcactttttatcatttgtttttgtgttaaaaaaaagttgggattagaatgttgggatattttcatgaaaacctaggaaaattccataagtgaatatttgaatttgaattttcactaaaaacttatgttattttatcactaagctaaacacaaaatgtcggacgaaataataagagaggacccactcaattattgtgtttattgaccacttgtccttatggaatgacgtaactagcgtgctatcatgtgtcatgttcactgaattgtcctcattagaaattcatattagtattattattgaaaaatacattatttatgtgtatgattttattattactccatgtgttctcaagcatgattacatgcgcgattggtgattttgtccctacattctctttcaattattggtgtctttggttcaattaatttataatgttttggtgaaatatctgctttaattcttctcttcttcttaagtaatcttccaaattaagcaaaatcatttttgcttagacaagaatcttgatatcatggttttaaagtaggtgatcagtgatccccatcaccttaaaatacgcagtattttgtataggtatataatatgcggtattttgtgtgtatatactgtcgacatttgaaagcatgatatccatgatcacgtatcaaggttaaatatgtcattacaaacagttgatcatacaatagtgattgttgaatatctcaatgcagaatcaatgatgaggatttgaaattggtcataaaagcaatttaaacattcaaaaattaacagctaatgaaaaccataattacaaacatgcacctcacgtgaacacaccaacgaaggtgttttgtttttatgagttgtgttgtacataagaaccagtttgcagtctaaatataaagaagtggacaccaatggtgtctatggtcccacaacgtaagactttttcattattttaagaaaacacaaaaaaatcttcattagaacgttcgagagttacttgctgttttccacgttaaaaagataataaagtcaaaaaacgcgttcttgataaataccaaatacacacagattatactactactacggaacggggtacttttctaagaaaagaaatataaaacgtaatctttttaaagatgaagaatattatttcttttggtaatttcatcaaacactttaaagtttgatgattaagtgtactgtgttcattttcttaatacatgtttcatacatctatgttcaggaaatctaa

SEQ ID NO: 14214 - DNA, 756 bp, Aquilegia coerulea
  Intron number 2 from transcript AcoGoldSmith_v1.007610m (l ocus AcoGoldSmith_v1.007610m.g) derived from phytozome v7. 0 (chr-ID scaffold_35; pos 2423187 to 2423942 reverse stra nd)
aaggaggatcttgagaagcttttctctgaaacaacgtatgttcttttctaatttcttgcttgtgtatatatttatatggttaaatctgttgtagctgatgaatctgattttacgcgtaacttaaaatgtgtcaaattttagaatattgagattgacaatgtcagaatttgggggtaattatgtcttagtccaataattttggagataaagattgttcttgatctgcagatattatgtgatttagaaattacaattagtattggtaggacctgactttgttttggcattctattttttttttttttttttttttctggttaggtagtttatattgggattcctgtttaattataattgtaatggatgattttcttgagctcgattgttgcttaagcaagttaatgtctgtaggactcctagagatcctgacattgtcatcatatccaagttcatcatgttaatggattggccaaaaaagttgtaattctctttccattccatctaagttgaatagtataaaaaactaaaaacagatttgagtcgtcattattaatgttggaacagcaagatgctctagtttttagtgatgtgcattaaaattttcctaaaagattgcatgatgatttattttatttttgaaagatttcatggtatattttgttttgtattgtatatttgtatgtaacattggcatattttccttttgaatttacaagtaatattgcttcttatcttgtcaactgttgggaagctttg

SEQ ID NO: 14215 - DNA, 1424 bp, Aquilegia coerulea
  Intron number 1 from transcript AcoGoldSmith_v1.025064m (l ocus AcoGoldSmith_v1.025064m.g) derived from phytozome v7. 0 (chr-ID scaffold_4; pos 327644 to 329067 reverse strand)
attgccctttaagtaagtatgtagctcctttagttcatcttatagatgcttcatttgttgaaagaattgaattgagcatgtgactctcttttattttccatgttacagaatatgtgtactctttaaatctaaaatgtttcatgtcactttcttttgaaaatagtaaatccataagaaactttgagattttaagagagcacccccaaaaaatagtacaagtggtcttaaaggtctgttattgtatgatgctcttctcttataatagtaattctcgatcaatgaattattgatgtaactgtgtgaaggtgcactttacttgatattaggaaacctgttacatttttttttcaagtcaagatgcttttttgtttcatctggaagtcgactttgctatttggtcttgtagttttggtctgagagaatcttatttgcctcgagcaaacgtacagtatgtgtcatgctggctgtggttgagcgtcttgaccaagggagcgaaggtatggagccaaaaatattgatgattggcttattggaatcaagaggacttaatcgtaaatttgctgtaatggctccacacaatgtagacttggactgggaaaaccaattagctagaacattttgtgggcctctcctggtttagattcactgctttgttcctgaaaccaatcccactaaaaatgagtaaccactaaccagccacaaaacaaatctacaacaagaccaaccagaagcaggcatgctacatatccagataaatgataaaaggtcatgttgaaattttgatgctacacagctctgtttttacactttacatgcttttgtgacacaaatatctatcttacactttacattgttagttaatgttttaagtatggctcaaatggttgggctcaagccgtacgtatcttgtattgggaacaatatgttaatgagaattatgtattactttgaaatcaagaaatcttgaactagtacaatgattctcacatggagtgaaatttatttatttatttttatatggaatacaagagaaaaatttggctctctactttgagaaattgcaaagtgggagcaaacatccaacctctgttcatattagcaccaaaatgcttatgaggaactttttgctatctattgttcatgaggaagcagatgaccctccttctgacaatattgactttatgtgaaactctatttatatatgtaatgcaccaatatatgttcatttgcaagataggccatcagcattcagcagtatcgttatattgctaagtcgatcattcattgacgtgtttatttatttgctggatgttaaaatagttaagctaccttttcttaaagtaaaagaaaaactaccatgaagctgggtttttgatatgtcgaccaatcattttgttatggtgcagtttggggcgcttgcaacc

SEQ ID NO: 14216 - DNA, 3680 bp, Aquilegia coerulea
  Intron number 6 from transcript AcoGoldSmith_v1.002880m (l ocus AcoGoldSmith_v1.002880m.g) derived from phytozome v7. 0 (chr-ID scaffold_18; pos 1792209 to 1795888)
cttgaggtaggatgataaaatttatcggtttctacatattgaagattaggcaagatctattattagttcatttatcttttcccttttaaggtttgtgttaaattttaaaataggattttgtggtgttgtgatattggagttttattttatttattgggttctggttgctgcattgtatataatatagaaccgtgatacggtggagaccgacgttaggggaagagagaacaagagaacaagagaaaagagagaaaagaagagagatttcgaaaaacaaaaaaaaaaagacggacagacagaaaattaaaaagggaaaaaaggggacagacacgagtttgagctccacctgactctaaatggacctcctaacgtcagtcgattagaaagatcccatttgggaaagcgtcgagtttttggactaggtgacaacttctgcctaagtcgcttcaggtggttggccaggtacagcgtagaaccatgatgtcccagttagataaaatgagtgttgttccctgccaataagatctggtttgccaagattcctacaaaggttagtttgtttgtatagacgttagctgggctagatttttcatgacagacaaaaagggtaaggtgatgctgaacagttacccgatttgttggcagcagaggtgggtagtaagcacctcttcctctagcatagcatgacaaggctgctatggaccttgtgttttcttttccagggagattactggtcacaaatagggacgctgttttataaacaagggaagtaaatgagtgttgcacagagtggagcacattatcaaaatcttggtcaataatgaggacccccatagatatcatttgatgaagttggaatgcctctgttatactaagcagagctggggcttggatctctagaacatattagattgctttgttagtttgttagggaagtggtcatggagacttggtgaggaatttgaacagagaagattgattgtttatcgttgtgttaggcaccacatttaagagactgactcgattaggctggtgatcctgaatcttctcccttcgtgacaaggattgtatacgcaacccttcttgattgtaacctgttttggcttggtgaagataaattttattagaaaacaatttatacatacaaatgatacaagataagttgagaatacctaccgaacctagaaaacaataacaaacaaagaaaagttatcgctttggtgtaagagatggccagactacagggagatcccttttaccacctttatatctcgtgggagtctgttattattgggcactttatttttgagaggtaaaagttgaatcttaaagaaaaaaatatggaggtgagtgtaactcaaatttctagttttgttaatatcgatagattagagctttattattgagtcttgatgtaggttggttgtatttgtagtgtgttgttgtcttttaaccagagatatctcacccctcggccctcagtaaactttgtattttttccttatcatatatatacatgcttgtttacctctcataaaaaaagaacgagtctctatcgtaaacttacttaagtaaccccataatggaatcccatctgaacacaaagtgtccaaaagttatctgggttacattgagacttgatagctaagattacttcctccatatatcttgaccctcccttaaaatggtcctgtatctgtcctaccatatcttttgtctgaagtttgaaacataacagacaccatatcaaaaatcacagtttttgataaatggtagacctagagtagtaatgtgtattatgcagtcattaaatcgaggacatgattttttgttttcacaataatatctcccacccgctcattctttcatatatcccttctttgtgtcttttctctttgcagccttggtttgaggttcatctaattgattcttcatgttatttttacttttggtgaggaattatgatgcaatagtgtgttctatgtggcatggccatttatgctactattcgtgttcttgttgtaggtcccaacatatgctttagaaggctaagacaagaaatcaagtgccatcaatgttgtatactactcgatttgtttggtatgaaatcataaccttgtttatgcttgactgcaaacgttgttctgcccttaataaggcttcacatcagcatgcatattccaaagattcattgcgaagtcgatatctagcaaaatgtaccacacaaaaccaaaaaaaaaaaaaaaacttcaaatcgaaaacaaggtgacaatattcaaattatggaggagcgtctcaagtggagtttcatccgtttaagggtgattcatggatctaaagatctgtaccagacactgtattgttgtattaaggtttaatagtcagtcactaatctactagtatagtggggcgtgttttccagcctcaaccacaaacttctccccattctgttattgaaatgagcccttgatgaaataagaaatttgggatgatttttagttgatcaagtcttgagttatttgggcagataagtgttcaaacatcttcagtgctagtctagtcgtctattgccccaacttccaaggagagtggacttttggttctgcttctggactcttctttccaattctgtttttatgtccttgtatgtttacaaaattaaagtctatgatcattgtagtaaggtaaggctttatgtcccactatactagtaggaaaaagatatggcacaactaggatacctacccaaaattatattttctgctgatgtttatgtcttcaaacgtttgttttacccaaaaaaataaaataaaaagtcttcaaaaattcaaatatcttcagtgtataggtctggaaactagaagttgtgggaatggtacagagttttaatgtctcttcaacattgtgactgcatcacatgaatttggtaggtctcaaattttgttaggaggaatcatggtcattctgttggcttcaatagcatttggctgatcaaggaaagattggccgaccgtcatagaaaagtgccagacgctttcagggtgatccaaaaactggccaaacaattaaggcaatgatggagtacaagagtcatagaaaagtgccagacgctttcagggtgatccgaaaactggccaaacaattaaggcaatgatggaatacaagagtcaaatgtgtcatatggaaagtcaatcacttcttactaagttaaaatgaaaattaagccatttaaaatcactcttgattggatatgtggatctaggattgtccaattggaaatgataagtgaatgtgtaggccattgggaatagttttagaaggcaaatagcataccatgttataattctaatatgacgagggaaatggaaagtgaattttgtcctaaactgcgacttgatgcaatcttattcgactgtatgctgcttgcgttacatatatatgtagatcatttatttttttcgtttatttgaagtattttttcgtgagtgataaattaacctgtggagcaattagaaagatgtaactagataaattagaaagatgtaaccagatgacaaattccaaaggtaggttgttgacaatctatctatcttgaatgctatgatgcactattctgtagttttgtttataataaacttgctttgcttttgtatcaggttaacggaatacaaaggcaggtg

SEQ ID NO: 14217 - DNA, 3221 bp, Aquilegia coerulea
  Intron number 2 from transcript AcoGoldSmith_v1.011297m (l ocus AcoGoldSmith_v1.011297m.g) derived from phytozome v7. 0 (chr-ID scaffold_66; pos 1182663 to 1185883)
ttggcctgcaggattgagcaacagttcttctgtaggttagttttttttttttcgaatagtatttacagaaatttgttgtcgataaagctactttatcattttatttgaatatatggtggttaatctcataaagttagatgcataatgctaatgcatgcctttttccaccccgaccttaaatattaatgagtacctggtatttttatgcatggcagcatgtgttttgtatcaaaattttattgtaacgtgtaggcattttgactgtgaacttttttgtaactctttgattaaaataggtaatatgcatgtaaaatttatactacccaaaggtatgtatctgctctttatagttactataggtattacagaaagattgccaagcctcaaatattttcttgacacccacccagatgactgttttatctttacatcataataaattcttttgggttctctcctcttctatacttcaaatattttggctgtgtgattgtcttcatgagagagaacgagagaggcactaatgagtaacgaaaatcacgtcaactcatcccggcacacaaaccgtaacaattaaacatttaaaccatcctagaaacttgtctcctttggtagacatgaaagaatcacaaatttcgaattgacagaatgaggtatatgaattcaaagttgctagggatctagcagcaactttaactgataacctatatttctcagttccaaatggtcatcaagaacttttgagattccagatgcgtggaacaagttttcttcccgaaagagtttagggtttggagtaaataaatctacaatatactcagaggagtgaacacggttagcaatatggtctgaaaccctgtccgtttccctgtatatgtggactactgtaatctcaacaaagcgtgtaaagctctccctgatcttgcacaccggactctaacagtaccagggggaggaggaggggttctctacaccataagtctagacacagcgcgtaaggagtcagaagctaccatcacttttacagtccatatctcagattctcttctgaagtgtttggttccataaccaattaatccaaaagttttcatctttgctaaccacataaatcagtccaaagaggactgcaatattccaatctttcaagtccatgagtacatgccccatcctcctccttagaataaagcaatgtctcctaacaaggataaattagtttctgagtgggagagttcctactccatagaaacctgatgcaacactgccttaggaagaagttagaccttagtccagtaactggtaatagccaacaacactacctgaataagtagcattctccctgcataagaaagggttctggttttccagttttgtattctgacagtaactgagtaactcttccaatgagtgcaatgacagtctctcactgacaacctagaggacagtttagaggtagctaaaggtatatcacagtaggcacagagagctgcacacctagaagttcagaaagtagagtactctctaaaataaagagcgccaggtatgaggaaacacaattttcttgatctccattttttgtagcttttcttgctgaaattcgtaatgttgtagaatttcagtgttgaacactgttgtcaatgcttgctctgattccttcttatatgatagagcctaaaggtagctcctttacagccaaatttaggggaggtctaccatctattaaggccatagaccttcactgaaaagcccctgacagttgcgattggaaggctccgatcaaagcataagaacatgccgcctagtgttgaacaaaattgttaatgttcattgtatttttctttttttctttttcttttttttggttagcaagcagggttgaggggacccttacccctttaaattacgtgaggacttatatcaacaatcagctgttgacgtgttttgaacccacaacctctccactttgtgagaggggtgctaccattgagccacaagctcattcgcaatgttcattgtattacatgtggatgggttttagttaccttcaacgtggcctctaattgcctgaagtatcgtttctggttattctatcattgaagaacacttagtcgactttgtactaattattatttcatctgaagcatcaccttgtactaattattatttcatctgaagtatcttcatatgattagaaattacaagttgacctaggcactgtcacttagcaagaggccaagtaagcaaggacaaaaacagttgacactgacagttgcttgatcaagttatcccagtttatagtgaagtcaccaatgctgcaaatcttgaagcttgagcattccctagactagtcatagagcacagacttgacatttaagatcatgtcctctttagtgtgctttttagaatcaaagattatcccatttctctctttcctggtgacccttatgaatgctactaaggtgtgctcaacatccactggcttcttgaggaaggaccccactcagaaagctcgaccttaaagctttgcttcacaggtgtcagtgttgttctgaatgaaaaagattctagaaatgtgttccaattttccatgataaagggacaactgagaaagaggtggtggatgtcttatttttctctcatgcacatagtgtatctatttgggattatgcttcctctacttttcggttgatccactgtcagcagcctttgaagtgcaaatctcgagcagaaaaaatgatgctacagggaatagattactttgagtacgttcttagaatgtactcgcagcaagctaacatttggtcccagactcccaggtgttccctttcaaacaactctgcctgctgggtatactgtgatgcaataagcaccagctatatagtttgtgatcatgctccaattatgacagttgaacaaacagatgaaattataccgacgtagttcaaactcagttatctgcaacttttgtgtatgggtggaggcgtaaacttggattctgataaagatccaaaatttagatctacttaaatatctctcttaaaataatattaaaactttgttttagatttttcatctgactggataaaggtgtagattgaggatcatgtagtcttcttacaaagtgcattccagaccatcaaattgaaacgtcttaacagaaccctccatttttttcttttatttttgcagattgtgtaaagcgtgatccagaggtcagtgaagac

SEQ ID NO: 14218 - DNA, 1409 bp, Aquilegia coerulea
  Intron number 1 from transcript AcoGoldSmith_v1.006286m (l ocus AcoGoldSmith_v1.006286m.g) derived from phytozome v7. 0 (chr-ID scaffold_55; pos 491636 to 493044 reverse strand )
tctttgatttgttctaattttgactaaaaacaaaggtgacgaatcatcaacgttagcattaatttgatatatataagtacattcaacttcagatctcatctactacttctcttctttctctgttcatagattcattattcatctattatatctttctctctgttcaagttattgttttaaggtaaatggtttatgattgaagaagtttatttcagattgaatggtttgtgattttgttgtttttaagtgttttaagtaatgggtttttgttattttagtgttatgattcttgggttttttttatttttttgaaattcttgttaattttagctttgatgacttgttctgtttttttcaaagtgatggatttttttttttttttttcaagatttagtagtttattttgctatttgtttgttaaatgaacagataaaaaaagtgttgaaaatggagcaaaaaattaattttaaaattattgattttgtttatatttgttgatttaagataaactaattaaagaaaattagaagaatggcctttgaatggttttgaagttttaaggagttatgcaaagggttttttcaatagctttgaggtttagataattgataaagagaacacccctgctttctataagagaatgataatgagttacttagaaaccattgaaaaagcttgaatgtgtggtgggataatggtgttggttgactgttaggtcgccttctttgatccattattaggtgtggatttatcttttgttcaattttgatgaagaggtgcaattttaaatttaaatttgtttgctcgtaaagaattatgtttgagtaatgttggagttttgtccattgtactcgctctttcgttcctattgaataatgttgattacctgttggcaatggcaggaaagagataaccatttcttttctgacatgtgcttcaatggagttccaactttgttcaatcatttgcctaaagaaagaggaatgcttgaagcattaggtacttttgaccttcattgactaatttttagaacatcttacaactgtattttcactgacatcaagctttgccttatttgcatcacatcgtcagtcaattctttcttgaaagtgatgcatttcaacaagtaaatgcaaggatgtaaggggacattaattttacgtgttaactgctcaggctccgtttattacctttttgtgggggggaggggaacatatttttgttgaactggtgattgtattagaaaattttaagaaccgacaaaagctatttctctatcgaatttgttttcaatctcgaaccttttctatagactattctactgctattatgtgctgctattgttaggcttatattatgatataatctttgcagaagtcaagctaaactttcttcaagcataagctggc

SEQ ID NO: 14219 - DNA, 1145 bp, Aquilegia coerulea
  Intron number 1 from transcript AcoGoldSmith_v1.014975m (l ocus AcoGoldSmith_v1.014975m.g) derived from phytozome v7. 0 (chr-ID scaffold_42; pos 1970910 to 1972054)
gcgatccgaaaaagaatttcaaacatgtatgtcaaattacatctgtctttttatcttggcattgagtaataatgcttataatgttgataagaatttcgctcaatttatatatttacagtgttattttttgatctgcccgaaagataaattacattaataacaattaattagtttgttgagatgagatattatttttctttagtatgaattgaaaacatttttattccaaaatcatacaaactcgcaacttaggattagaagaatataaagtaatgtccaaatcaaaatctctgacctggtttatattaacaaagaacatactgttatgtaacaagcttgtgggttagtgggtacagaaagcggtctagtgtttgtagttagcgggtagttttatttaacattatgtaagctatataaaggcattgtaattaacatctgaattatggaatgaaattattgtttgaagttaggcttactagtctgatttagaggtgattccctcaatagaatcaaatcagaggtcacgggttcctcaataaaccctttctatcatacaatcttagttgattgtatcacatactttcttcaaaacaaattccaaaccatgaagtttatctcacctcttttatatttctatgcatactcataaaattaacctttttggctaaatataccaacatgtttatttatccttaaatttccctatttttacagtattgtcatcttgttttattatttcacggaatagcatttattctgagggtctgaatatccacaatttcattgcatcacatttatttttttggctggttatctttctggtccacagtaaaaatttatcatatgcattcctttctctaattggatcagacaatatttttgtgctcaaaagtcattttgtctgtctgttcaaagattcaacaagtgaaaagaacagcattcatgcaaagagtttgcatgaatttccacaatttcattacatcggatacttttctttaactaattatctttgtgctccacttttgaaatttatattcattatttaatgggatcgagtgagatctgccaaccattttgggcttaaaagtcaagttgtctgtatttgcacagattcaacaagagagaagacgactttccatctttaa

SEQ ID NO: 14220 - DNA, 607 bp, Aquilegia coerulea
  Intron number 1 from transcript AcoGoldSmith_v1.015502m (l ocus AcoGoldSmith_v1.015502m.g) derived from phytozome v7. 0 (chr-ID scaffold_20; pos 2515701 to 2516307)
gtgccattgttgaataatttaggtgacacactaaaacacggctaacaaactagggcgacgaagccaccttgctcatattatcattaaatcgaacttttcaagcgcgcatgtaaacacttgtacgaagaaatcctacaaaaacaaaaagaaaaatcgtaattatatagccacagaaagtgatacattcctatagcttgtctataggtgttaaaagaataaaattgtcctaaatttaaagggaatgaagatcaaagaatcatatctttatttagtgctacatataaaccgaattgaatcagatgctcccaggccactttcacaatctcttatatatggtagccattcccatagtacaaaccctagtaatgtgtcttccttccttctaagttctgattatattgagcactcggcagcactgctattgactactagctagctagctctcttcttacaaatcataatggtatgagctaggcttttggttttgggtatttcttatgtgtcatgtagtactaattttcgttattaacatttcgaatttgcatgtgaatgtataggaaggtgagaagaaggttggagggacaaaaaagactattactgttgggcc

SEQ ID NO: 14221 - DNA, 2793 bp, Aquilegia coerulea
  Intron number 2 from transcript AcoGoldSmith_v1.010896m (l ocus AcoGoldSmith_v1.010896m.g) derived from phytozome v7. 0 (chr-ID scaffold_9; pos 947043 to 949835 reverse strand)
ttttggcgatctgttcgactttcacaactcacaaggtaaatcttatctttaatttcttgtttgtagtcatagataggaaaaactcttttatcttgttagaaacttgtacaaattagatatgaactcttgttttgttccaagtcaacattttcactggatttgtcaatatctgttgcgtggaatttatttttttatttttttattctgattttttgaaattagttaattacaaagagtctgttaactgttgatgttcatgaacacgttatggaagtcacttagaatttgataacttaaagataagagcgttcattacttcattaggtcttaatataaattagacattatttggaatccaaaggcatgacaaaagaatttaaacatagagttgggtttatgtcgacagtccagtcgactgaaacaaacttccaaggctgttctgtggtctagtctctaaactaatacggtttgagactaatcgcatatgaaatttctcactcttaataatgacagaacgagtgaagggatgtattcaatcacctaagtcgaaagtgtaggatggtctaaccaaagatggatcaacagcttgctcgacatctaaaaataaaaattttctttgtatatcaaatgattttcactatgacagtattttttcattactactcaccagtggttttccatcatgatcgtaggaaagaaaaatggtagggacgtaaggcaaatcagaaaggtcccaaggtctttttgtttagttgttgaaagaattatggatagaatattttgtagtttaatttccaaaaatgaaagtaggttcatataaccacatgtcctcaagtagtagggatttgggataagtaaaatttcattatgcagccaacatcagtcttgcaatttccatttaacttaaacatgatcctctctgaaaaaattgctgatagttggtgggaaaattcagagaggaaatgaaattagtcttagccttccgactttccaaggttgctaaactgatccacggaaagttggtaactcgaacagacggttcagacttattttctttgctgtatatattaatgaaggttttctgtgctgtatatacattagtttctttactcagatggaggatactcattgtgaaagcaaaacagatacagaaaaatattgcgaccatgttttacaaaatgtagaagtgtaagtgtaactaggaaatcagtgtgtaaaaattctcattttgcaaactacggaaaacatgcctgccctctcattcctggtcaagaatggaagagctgaaatcagagtcaacgatagcggaagccattttgttggtaacaccctattgaactttatatttttctcctttggtaactgactaactgtgtttgggcttttgtaatgctgtagttaaggataaatagtgttgacattggggttcaccttcctaatcaggaacatgtgttggaatttacaatctatagatacaaaaaaagtctttaggttggggttcatcttcctaatcaggtacacatgcaatgcattgagaaaaatgattgtatcaatctatggattgtatcaattaattgaggaaatggaagtccataaatgtcattttcttgtatctatagattcacatggatatgtctagcaggtatgtataccgcatgcattgacaacctccgttctgttagagtacagaaacctcctcctctccttttcatactcacaaggttacaaaccatgagatgctttacgaccattctaggtaagaactaagaagccacccacacatatatgatgacatttcaatctccctaaattaacaaccatgttacaagtgtatatgctgtacgtagttcctgtaaaaatgagatccaaatattggaggagaatgccagcaaacccaaatagatgtagatgtctagatggcatgttactgttcatttcactgtggtaccaattggcctgtttaatactgtccttaaacaatgttcagttcaataaagaagaagtgcacaagatcctgtcgacctgttggttgttggtacgccttacggtccatgtgatatagatcctaagtaaaagcataacaagtaatcgtgtcaacaatgcgaaattcagggggattctgtagagtaaggaatttcttccgattagaacaatgccaatgcaagtgtgtaaaacacttcccagccaatgcagcttatatgtccacatttatattgtgtcaattttacgtgaatgtgaaaatctccacatacatttaaaactcacactatgtactttatgctacgtgaaatcacttgtcagattttacacatctccatgggctccattaaaaaagtgataaaaaggtcatatggcacctgattggcacctgattttctctgctaaaatctgaggtgtcccgtttgcattgggaattctgtaaagtaaggaatttcttccgattaaagcctagagaatttactgtacagtgtaatatatcactaaatatcttatatcaatttaattatattgtcttacttcataaaaaaaaaaaattatagtgtcctactctactcctaccgatagcaatgtatcattgaatatccatgtagttttcttttacagtgggcctaattggtcagagtctcatagcgcatcaagttgaacacctgagttgtcccatcaattgctttataaaaatacgaataaatcatagtgattgcgctgttaatactttaaatacaaataataattaatttacgtggcatcgatttgacagctgtacgtgctatctttatagacgctataatccta

SEQ ID NO: 14222 - DNA, 1416 bp, Aquilegia coerulea
  Intron number 1 from transcript AcoGoldSmith_v1.007606m (l ocus AcoGoldSmith_v1.007383m.g) derived from phytozome v7. 0 (chr-ID scaffold_42; pos 346799 to 348214 reverse strand )
ctcgcttgatcgatcttctctttctcttattagaggtaattacttgtttctttctttctttctttctttctttctgagatatgttcgtatgttctgatttattagggtttagttttcaaaactatttgcttagttcacttttccaatttctttatttgtgattatgtttaattttgaatattatcatggacttcgtagctgttcattaattttcttaatcacgtagaaatgagaaattattcttctcctaattttagattagtctcgattttcttaatcaatgttttgttttatcaacttcttcggatttctttgttaagtgaaagtggcctatgtaaaattctatggaattctttcgcatatcttaattcaactcaacaatcacaatcacaatcacatatagtgccactaattaactaccttcaaggtattccctgaaacttgggaaaaaaagaagttaaatctaaaactttgtatacccagatatctttagaaatcctacgatgtttttaacacatctaacacaaaaataaaagagtataaaaagttccaaatacctagatcgaggttcaattccctttgttgcttcgagggataggcttagtcaggtcggtgtttcgagctattgatctctttggtatcttgcttggtttgttgttactattataaatagttgtttataattataaataatcttataactagtaggaaaatccaacccttatcagatgttgatgttcatgaaatttttgttataattaaattcagtgagttgctcttttcaaattattgtattaaagttttaatccttgatgtattttcgtcctcttttcaaataaagaataacaaacataagccaaaaaggaatatctgcttgtggggttttggaatggaatccaatttagatgggagttgagggatccagatcttggatttatggggatttttttttggaggggggggggggggtgctggtatcgtggttttaactccattccaacaattaaactgattaaacaactttaaaaggctaaattctgttttactttttgaaaacataatgctaagtattcaggtgattatgtatgcatgtaacatgtgtttagataagtcgataacctattttaatttgaaatctaacagccttattagttattacttatctctctctcaattacaaagctaaataaatgaaaataatgtttgtctctctctctctctctcttaattacaaagttcatttttttatctttccaatgatatcaattactatcatttttaattacatagaaaaattatatagctataaataggcaacagtttgtcttatttttctattcttgaactagaaaggttaaactgaagttctatattttatcaggggtttacacctggtcttctttgttgttaacacaa

SEQ ID NO: 14223 - DNA, 693 bp, Aquilegia coerulea
  Intron number 9 from transcript AcoGoldSmith_v1.001873m (l ocus AcoGoldSmith_v1.001873m.g) derived from phytozome v7. 0 (chr-ID scaffold_6; pos 7757411 to 7758103 reverse stran d)
agaaataagcattccaagaggtatgatttctgacctctttctttgtaattatttgaactatagttcccctagcagccagagtaaggtatgaatgatgtatgtccactatctgtttggttaataattatttgtaggttaagagaattcaggtgtagtgttaatgtaatccattggctattatccatatacactagattcaaccccaatatattcctcttgaaattatgcaaagaatatgatacgatatatattttcctactataatggaggatgtatctgtattctgttaatacttttccattcatgaaggagatgacaaaatttatccatgattctggctattgtccagatttaccatcaattatcccatcataggcaatgatagaatattctactctattatagctaatttgttaatattttgtgtacttctcaaatttagtttggatttatctttgagaaattttattcttgctggaaaatttgaaatctcctgaaataggactggcaaaattgtagagatataaaagtaattttacaggacaaattgttatctgtcaagttacaatctaagttcgtataatgaagtttgttgaatattataccaagctcatatatgcccatttccgtttgagtaatgatgtgctaaactcatatttgagacagtgttccatttctattttgagtagtggc

SEQ ID NO: 14224 - DNA, 2948 bp, Aquilegia coerulea
  Intron number 1 from transcript AcoGoldSmith_v1.004604m (l ocus AcoGoldSmith_v1.004604m.g) derived from phytozome v7. 0 (chr-ID scaffold_24; pos 1411701 to 1414648 reverse stra nd)
ttttccgaggactcaccgtcgctgtaagatctctttttaatcccaattctatctttaatgtccattaatttcttcttcttctttattttcaataaattgatttctaatttttttttacaatgtcattatttacaagagtgtttttgttggttttctttcaattttctttgcttaatctagaaatgttttgttttattaatttttttttttttttataaattttgaacacacttcacgcaaaggaagaaaaacagagtataaagagtaagtgtgctttggctttacctaaacaatagaaaaagaaacagtgtcaagttcattcagttgagatgtaaactttattgttagttaacttgtacaaatatctgatcatctctatctctttgattttatttttatttttatttttgtgtttctgttctctgttttcatccaaccttactttattctatattctattcagtcgaatcagttccatacctatttttttttaacaatttttgtttaaacgtacacaaaagaaaccacaactatacgtagaaaccaaaggtcagttttactcttggggttatttttaaagaaagaaacgacccatatttgtgtcggtcattataaaaaaaaaattaaattagtcaagtagtgactttcaaggcaacaacccatgttaatgtatgatgatgtattgatagatatacagaacagaacataacagagcagcagaggcttaaaggccacactttatctttagcatttgtttggtactagtaatgaagggctgaatccttgaatgtcccctctttgccttgccttatagttttggtcatattagccgtacagtcataagttatgataaaccattatgttgtcgtctcttaataaatatgatttaaaaaataacagtatatttgaggaagataaaaggtacggtgggggtggtgaggggaaaataagaaatgataaccaaccgacccattttatatagcacatggtctactcaattcccacggattgttgtgttgaattcctcctaatgtttccaaggaccatatacagtacatcattggcctagaggtgtgattgtgacatgggtatggcattgttattgttactttcacccacaaaacagtcctagctagtcgtatcaattagagattggttttagattcttacattacatatttagtggtggttgtgaaatccacaacataggcactgtgacacttaccttatcttaccttaccttacattacaagatgtggtgtgatgtatccatgtgaccatgtcttgaagaaatatactgtatgtagcatcataaaaaaaaaaaaagtacccccatccatatgttatttgttattcttttgagatgaagttggtctactttcattgtcccttctagatacttgttcctatgttgtacgtgtactgtgaaaagcttttaaaagctggagtatttctctcactttctgtaactttatcaatatcattttgtttcttttgggtggttatcaataaaaacattcgggaagctagctagggactagggttagaattgaaagaaagattttaatttaatttaatggtcgtagttaacctgtatgtgtctgtcaatagaataatacatgaacaatatatactgaggtactgttactgccttactgactacttatatattaatattatcaaaaaaagttaaatcttgtccttgctttggtatgaaacatgtaagttgttggactacacagtacacacactgacacatgaccctcatcatcatcagcttgtttactgttgagttgttgatgaattgttaacagctgtgtgtgaatcataaagacaaagacactattattgatcatactctatatgtactgatcatagatccaacaactaataactttcaatggtaaatagaggatagagatgttggtggaagaggcatggttcttggttcatgatggcagctttgaattaacacttgtgtttaatactctaagacttaaatagaaagaatgaaagacagatataatttgatggtcttatcccctgttttggtatggtgcatgctttcattgctcacacttgactacttgagagagtagacttctcaaagttgaattttgagttggtagtgcagtaatgctgatgtacagtattactgtatatatagtggacctcaatgtgtgcattaaagcttattatttctcatgtataggattctatttcttttgtttgtaatacatcttgtttggaccattggggggatttgtggagactttgagaaaatgacaaataagttggctcttgggcattatatggttaactaaatttatgggattctggttccatttgagcatgttgacttaagtcccccactttggcaattagccatatttattggagtaatgtgtatgaggtaggatatcctgactagtatctcatgcccatatgccacccatttggattagcggagagttgattttgggtttgtcactttgtcaaataatacgaatcattaaaacttttaaatggtctacaaaagatatacagtaatgatgaacaaaaaataatgatatgatgtccattttgctttagttcatttattgttgttggaactaaaatcaactaaaattttattcgggattaatgatcttaaaagttaaatccttatcaattatggtttaatatgaaggatttaaatctaggaagggtttggataaaaatctgtaccttattcaactctatacgcgagcaggaaattggcttagaaagaaacctgatttcaaatgttaacagaatgacttcactttataagaatgaaatttcaaattaagtcatggtttgtttttaattaagttgtcattatgggtttcagtctagatgtataaaaaaggtattgcattttgacaagtaattttaattttctttatttcttcaatatgatacagttg

SEQ ID NO: 14225 - DNA, 1134 bp, Aquilegia coerulea
  Intron number 2 from transcript AcoGoldSmith_v1.001278m (l ocus AcoGoldSmith_v1.001278m.g) derived from phytozome v7. 0 (chr-ID scaffold_1; pos 2325165 to 2326298)
cagtggttttcctcagaatagttgtatttaggtgagaatcttctgaaaattagtcttttttttttttttttttaatgaacatagctcaccttcattggtggagtctatggtctgtagatggttgttggagaacactattaaaagtagttatgtgttcccactaatctctggggagtcactactcattttggttgccctttgaggttatcaggatttgatagtatgccaatcgtttagataaaaagatgatacgactctgataaaattgtctgtagataagatgtatgtcttttaagatggtatagtgtagacaagaagtctcttgataatatactttacataatgaggtttgctttttgttggcatgatataattgtgggatactctcaggtttgaaaagataaacaagatgtacttggtcgtagatgtgccgtagaacgagtgcctggattgctttaaatatactgagacttgttcctgttacttttgacatatttaatcgctattatgttttactggatagaaagagttgacccatggttttttggttaacttcaacataagaagtaatcgaaaatcatttaatcccttttaatttttgcatcgtctgttttgctcaaatttggcagtatgcttagagatatatttattttaacatgtactataggacacacgtctttgctgttttatgtctaaagtttcgacccttaaagttagtaggtggaaccgtggaacaacattctgtgaatttgttgcacaggagcaggatttggtgtttgtccttaaaaatgtgcaggaattccgagcagagtcggagtaactttctattctaatgttaaagaaacattatgagtgagtgctgttgtctagaatgttcgtacaaattcatagaaatatacttaaatgtcaaataaatcttgtatgagtgggaggggcatatccttgtttacaggattgaaatggtttgtgggttggcaaaatttagtaaatttcaccaggatcaggcaaacaatttcttgggtgcacattatttgaatcttactttgtcaccatttgttccatcatgttactgatacttgatatataattttttatacagtatccggatcttctcgattgcttctctcttctgca

SEQ ID NO: 14226 - DNA, 4459 bp, Aquilegia coerulea
  Intron number 2 from transcript AcoGoldSmith_v1.019028m (l ocus AcoGoldSmith_v1.019028m.g) derived from phytozome v7. 0 (chr-ID scaffold_47; pos 1955187 to 1959645)
atatagaagtgggcatctatactaatcttgacaaggttggttggttggttgtgtcgccaaattcccaatcaacaaacttgtttgtattcatcaatcttcaccatgacctgagtaagacaacatgaactagggtatttaagagaaagcttcaagttctggtgttctttatactgagctactataactgaggtggtcagagtgggaagtggttgtctttttgtaagtttgtagaagtagaaccaaccaacaaagcgactgaaccccacttctgagcattcaattttttttttttatatttcattattttgagacaaagtaaatggttgtatgcagttttcatcactttgttatgtttagaatttagagttaggtttccttccatgcttgacattgctatttggactgagtttttgaaatccagttttgaacatattcaatgctacacttactcatattaaaagtttttctaaaaatgaaaggaaaagggagtaaggaccttgtgatgtgaattttgaatagagaatcataattctaaggttaattgcttttactggtttcgatttacactggttaaattagatcatgcaatgctagaagtgattactttatgcgaaacttcacttatttacatacttgtttcttctgtatatccaaatgcaacattatttgaccttgttaatgctttgattcttaatatatctaccttgtgggaatgtttttgagcattttgcgagagcttaaaccttgcagagttgcaacatctgaatatcttggagactgggacacataggaatgtttttggggagtgtactaatcattgccagcgtttttttgttttatgaaatctgtttgtatcacttaatagaaagtggttctgttatattgtatgacttttaatgaacaacttctttaacttcgactcttatgatattacttgaacatctcctatcctatttcaatatcttttaattttatcaatgtttcctagcagtgaaatgagattttgtgtctaaaacaacggaaaacaggttacaggttgctgaattagatttaacaagttaccagttgctgaaattagaattaacaggttacccggttgcaggttgattggttttagcatgtctgaccccgacctgttttttttttattgatcgataaaagatgttttatttattgatgaaaagcaatacaaagaataaccttttctctctccccgtcccattacattacagatgccaatcccaagatatagttttcaacacctctcatccaatgccttgtacagtatgcttccactgaaagatgagatcctgaaacctatactctcggttcaactgacttcctaatgtccagttccatagataggcatgacccttacattcgacttctccaccagtgtaattttctccttttcgaatcttccatacactccatccaacgtacggtactaggtaggtcaggatcaggtcgaacagtttaaaaacaggacaggtttgggtttgaatattctaaaacaccaaattggcttttagggttgatgagtagtttttttatatttttgattctggttatatttcaaaggggaaggtttatatagggataaagtttttttgggttatctgtattgttagtagtttcttatgtgttcatccaaactggaatccagtggcattattgtctttaagacaattttctttattagtttaaaattatttaagcaattgataatgctgtattgccatttatgaaaagttttgtttcaaaatgtcaactttatggtttattggttgcaagtgtcgttagcacttagcacacatttttctacttttaactggttggggatcttaatcaccagaattttttcttttttagctattcattttcttatgtttcttattcacagatgactccctctgtggggcatagatcgccaacacggcgcgatggttctgacctgtcaaaatccccaatcaggggaaggaggtctcctcgcacaaagagcccatctcaaagggaaagatcccctgctcgacacaggaactctcccacaacacgctcttcaaaagagaagctttctagtaggggtaggtctccaaaacgtccgaagtcgaaatctcctgctcctcatagaaagcgtctaaagcatgcagacgaggaagatgtggatgaaattgttcctaaagagcatggggaatatagaagtagggaaagaggcagagagcatgcggatcaagacaggcctagggaaagaggtatagatttggaaactttacgtgatagaagtgagagaaggtcaggaagggataagaaagtaggggaaagaggtatagatcgagacacttcacttgacagaagtgagagaaggtcagcaagggataagaaagaaggggaaaaaggtatagacccagaagctctaatcgacagaagtgagaggaggtcagcaagagataagaaagaagggggaaaaggtagagatcaggaagcttcagttgacagaagtgagagaaggtcagaaagggataagaaagaaatggagagagtaatggatagggaagcttcatttgacagaagtgagagaaggtcaggaagggataagaaagaagtggagggagtaatagataggcaagcttcttttgacagaagtgagagaaggtcagcaagggataagaaagaaggcgaaagaggtatagaccgggaggcttcatttgacagaagtgagagaaggtcagcaagggataagaaagaaggggattcttcgaggtcaagacataagcggtcaacatctccaatggatagggaccgtagtagacccatttcaggttcacccactagggcttccaggagaagaacacatgatgaggtatttggtgatatatacttaacactacttgagtactttaaagtgcttgcattttctgtttcgcttgtcgtaacttgtaagttttaaaaccaagtgctgtttttctgtcttatgtaaacatttggattatgaagagcaataatgcaaattcggtgtcaaaaagttgctaggagtgagatctttaatctttaaggcaatgtttgagtgtttgaccctatttcttgttcatgaatggatatgtgcttgaatttaaagtaatcgacatcttttggtacgcattcttgtttgttctatgccattaaaacttagatgtccacgttattaggcatcttagtaaaagataagaatcccctattcacgagaacatgagttgttggattccacagtagacccgctaaacccttttgtgtgcaccaaacacagtcacaaagctaattaaataatatatgccatgtcactagattaggtctctgggtacattaaaatgttgccaaacatgcccttactattatgattttatatttcagttgtgcttgccaatcgctggtattgttttgatggttgttcatttacacaatgacagggagggagggatgtgtatcttgaatagttgaataaacattattgtcaagaatttagggctccaatcttaatattggtacaagtagatgatctttttaagcgataattatcatgagttatctttataagctagatatgttgagactttagggttgcttgtaatccaacctcaaagactggtacaagtagatgataaattgataatatattgaaaagaatgaaaaaagtcatttatgtcactatgaaactcctactactcaaaatttgatgcacaattcccttcaatcattataatatcatttataatcatgactcgaaaattctaaataaatggacacacacatacctacgctaagatatgcatacattatttcttttattattttcttctgatttatgaacaggcttagataacaaggctgcatactttatacggttgtcataatatctatacatatataccaacatagataacttgtggcttttgagagtatttttttggttttgtgtttgagaagccaataatacaaaaactgacttggaagttacaaccctaaagaacccagccttgaagaggatgcagattggtgatggtggaagtatgagtttacttttttctaggtgttcctgaactcttggaagagaggctagaccccttttttgtttgattcaccgtcacaaattagaaagacttaacactcctcacgaggaaacaaataaaaacaatacgaacttggaaaccgataaagacatgcctccaagatgttgatgcagtcatttatatactgggttgtacatattgtttaaactagtagtcagtgacattatatttattttgctttcatcaatgaacaaataatttttcatacctgaaccttggtagtgatactcctgttgggatttatgctgataacgtgcttgtgttttttcattggagcaatattgtcgatggatttcattctttccttctgctttgtaacacaatgtttaaccttcctcttattttgttttaggtaa

SEQ ID NO: 14227 - DNA, 1570 bp, Aquilegia coerulea
  Intron number 1 from transcript AcoGoldSmith_v1.011250m (l ocus AcoGoldSmith_v1.011250m.g) derived from phytozome v7. 0 (chr-ID scaffold_13; pos 2399002 to 2400571 reverse stra nd)
agcatcatcggttgtgtctccctttcttgatcgaggtaagttgttcaatcctaccttcttaatctttgtaagtatttttctatggttcatttctttatgtattcattacaatttaattaattgaattaagatctgccccaagtgtcctttttggaagattgaacttgggtttgtggccattttgcaaattttggatctgagtttcgttataatcgcattaatttttgcttcattgatggcttaatcacagctgcttaaaacattaaaatctcaattataaagaataaatggaatgtgacataaattagatgatcttgtagctgaagggtttcagtgatttgatttattgcattttttttttttattatttgatctgaaagaaattgtggtttttgcatttgtctgtaaacatgcccaattttagggctatattagtttgtaaccatctagttcgagaggggggggggtgtggggagaaagagggaagtaatgtgttgctctggaattgctggtttggagtgacaccttggatagagaacaagactgattacatattgggtaaaaggagaaaactaggaacaatcagaacaatttacttgtcgctcaccccaaaaaactctggcatttggtgagattttggttatagtcgaatctttttatgtcctggtttgcaccatgcataaatataacatatcaacactatggtgaatggtaatgtttgtttgtctgaaatgaggttttgaactatatggagttgatccatttgagtgtttccagcagtcttgtgaaaagatgtgagcatggccagcagcccatgtttgttattaaacacctattggcacccttgaggatacagagtggtgtttagaagtgtttcttaagatgtatctaattctgaagttcaaagtatcttgtacctaaagctacttggatccactgaaaagttgtctttagcctttatcaacaaagggcgttgtttttgctagatagtgcttatatgtcatataatgctgttctttccaatttctaaatttggggaaaacaatcaacagtcaacttttatatatttgcaatataggctgttaccataacaaccataattaagcaaaaaatctatcaacttgttgtaacacacccctcagtccttggcgcagaacatgtataaactagcagtaaaattttagtcttgagttctagtggtgtcgtattatcagttgcactttagcgaaaggttttccagacttcggtatttttctttaagcttatagatacctcctcaaaataaaataaaaaataaaaaaattaatatggttaaagtcactacgtgtaatgctacctaggtacttacataattgccaaaacatacgctttgatggacattgaatatggatagacggatagttctgtaaacgtataaaacatgcatcaccagaatctattaaaatatgttcaaagccatttgggttctatttttgtttgtagtttaattcctttttaacatactattgtcctgtgttcactttataaccttcaacattcgtatttatgtgcagttaagctcgccaatttc

SEQ ID NO: 14228 - DNA, 4119 bp, Aquilegia coerulea
  Intron number 6 from transcript AcoGoldSmith_v1.002271m (l ocus AcoGoldSmith_v1.002271m.g) derived from phytozome v7. 0 (chr-ID scaffold_5; pos 7005001 to 7009119 reverse stran d)
tattgagggctacaataatcagtattcaggccaaggtaagggtatgcttttggtttttcgcttttatttgtttggatagattttaatttgtgattttgttgcgttgagactatgatgttgatgggtggtaataccttctgtcatattcttttttgtatttggcattcctgtttaagcaaagctgtataccatcttgtatttgacgtgctcccaatccacattgataggtgtaggtataagtaggttgcaatcctagataagcgaattggggatttgtggtgggtgataactgatacgagataaatatgtactttctcgtggattatcacgtggttcctggatgatgggaataacaaagtaatgttctcctggttcaagtgttttttttttataaatctggcaaaacatctattaggcaggacctcaggaagttcatgaatctttttgagtgttctaagtatttatcatgtccagcttgacaaacatattctgcatagaaaaggtttattcgcatctttggtcacgtcagccacttaataaacagtgtagactgaagaattgtagatcaatccagttcgttacttattcttgatgaagtaagtatttatcaaccacaatgacctgccatgccgtattgggttgtatgcaatggtgataaaaatttgttgtaattattcaaattcatcagctcgtgtataacccaataattagaaacaatccgtagtcatagtaactcacaaaacatgtgcggttgatctgaatctagcttttccatgaaacagaactacctccagctaaggaatagaatcctgatgtaggtctttgggtcccacacatactttgcccaatcagcatctgtgtatgcttccagccataactatccatatctaccaaactacaaggtaagctgactcaagtcgtggtctgtaaaccaattaatgaaatcgaagtgctcagtaacaccttttgttacatcggtacaccgtacacccctaagcgtatcaacattatgtccagtaattaaaattaaatggaagagctgtagtgcaggtttgattcttttgatgaaaaaacattccttcctatttgatgaatgaacctccaaactatgtctggtggtgattcattaagtctgtataacacttttttcagtttgctcaccaaaaactgaccgctagatgctcgagtcttcgaggcatataagttatagttttttctttctttctaaaaatgcggtgttagtatatttctttgctaggtttgcatctgtcaatagttgcatcttctgtctgttgagataaatgaacccatattgagagttcacggagctaacattatcagcaaggctatttagtgtggccaaacaatccatgtgctcagtgtcactttttgaaatatagccatgcgaggaggtgtattgagggattaagtcactccacatgtgagatccctaacatattatttataaccatctggtgcccttccactcattgccagtatggttttgatatagtatgctccaaaactaatatatatttaatttgataacctatttgccctcttgttggttccttttgaacaatatccgaagtacccttatttttttgtaatgcttacattacctccagctgtgcttcatcttctgagtctgatcaggagcgtttgaaagttgaaacagtacactgaaattgacaaagtgaaagtactgtatggaggagcaaagaattatacatacaaactaagagataagatgtgtcctttactcctttaagtacagacaccctttcgaatgggaagattagtcgtgacttcaaacgactatcttatctctcagtgggaagaaaggcacttcaaacgctttgtggctagggacaacgactatcttatctctcagtgggaagaaaggcacatcaaacgctttgtggctagggacacttgtgtttctgccaagtttaaactagtggcgtcctatgcactctcaagtgccgcctaggtgctgaaatccaaacagaccatctcacctaacaaataaaacggtctatttcgctcaagtctgcctggaggctctccgcttcaggataagcgatccagttcagagtgctgctgggcgttttaaagcccaatagacccccatgaaaaaagagatcgattagattaggtatctcttttcggccatagaaaagacaaaaaggtatagaaaagaggtgtggttgagcttcacttcttccacggccttcttttcttgggtttctctcttccaactttgcaggcaccagtatggatgcgcttcgcctcgcgtgtgacagcatagccagggcctagactcaggcctatcctaggttcacctccgcacctagctagcgcttgcactttaactgcatggttttcaggtctatctcgtccttctgatggtgaacacgaacatagcaggcacaaccgtatatctttgtaacgacagtagacaacaaagtcatggtttggaacagtgatggcagattgagataaggactgaagtgagcaaatctcaagcatgctgatgtgcctttcaagctacacccttctgttggtgtgtctctcgaataaagtaatcctttgataagtattgagcaacttaacaaagccagacaccatatatatgggtgtgtatccattatgtactttcttctaggattctgtgaatgtgattatgtgagtaatataagtataatggaactttctattgtagcatgaccagcattagaagccccatgaactgcagtttggttgatcttagaaatgggattggtcttggtccagttttatgttaggagttgtccagtgagtggaatctcttgttggctaaggccttgatataggaagaagcgcttgattatgagacgtgttgcagattgttttcctaacacccagattagcatatcataggtctggttcagtcttctcgagtagatttaaaagtttaacataatggtgtattttttttagtcccattcgttctaacaatatctatgcaaaaacctggattattgatcaccatcaattctccaattacagaagaagacagttctttccaaacccggaaactacagtgcccatgaaacaattgtagatatcgaaaactgccatagcaaggtaagatctttacaggtatgcaatactcataaaaacaatgagcttactaaaaggtaaaagcaatagcagtagaagttttcttgcatccatggaagatgtggatctacaatgtttcgtgctaatgacttgtgagcacttcctcaagataacaaaccatgttttgttactatgtttaactttgggagtggggaaagtgtcaaatgaaatggaaagtttatactatgaaagtgtgacttacctatgcacaagtcctgcacttagtaatagcaagtccttgagaacaacttcatgctagtgttattatcactatgtttgtcctaggatctgagttctgtagatcaagtttaatttggaatatgaaaattattggggagttcggttgtggcgttgaagttttgacagtactcatgagggctacatttgcagaagtttcaacttataatcttggctgttgatattactatatatcgtgtgatgtagaagttatgatcatccttagtttcatgattgagctggtagcttgatggcatatatcattttgctgctgaagtctcttactcctgattcgattttaattactaaatagtcttcatgtttcacattaatttttatgtcattttatggctatgctagtttatggttgttaaagtttgcttttatgagctcgaaaatggggacacagctctgatactattattttttgtgttgtaatggataacagtgtaaagttgctccgttagtttgaaaagtagttatattgagctttggccttttcttttatgtgtatgtaacaaaggtgaaggccttggaccttggtcagctaattctatttaaaggatgtgtccatttaaggcagcacttttcaacagttaaaattgatagtcatgcatcatatgttcttgcatgagttcatgatgttctggtgagtgacttgtgtctcttggcttctttgcagctgggcaaccggggatttctagtgccaaaagcaga

SEQ ID NO: 14229 - DNA, 870 bp, Aquilegia coerulea
  Intron number 13 from transcript AcoGoldSmith_v1.020051m ( locus AcoGoldSmith_v1.020051m.g) derived from phytozome v7 .0 (chr-ID scaffold_15; pos 3166062 to 3166931)
caaaacatcttgctgttggaactgatcaaggatatgtgagttttttttccccgttatcttcttatttttcttattgttctcatttgtgtttattacaccttttcatgattgtaaagagattgtagcaaccgaacgataaaaaggtgggttgagattaactctcggccacaatacaagataaagagtatatatacttccacagaatttcttgagagattttgccaaagagttggaataaacacaacgaccagatcaatctcctccaccaacactcaacccccaactgcccaaggcattgaaatctgcatggtgcaaattactctgtatgcaaaatcagcaatgaaaataggagaatagaaactaataaaaatgtagggagggggagaaaagttaatcaatcagaaaccaatagacatggaaggagacagtaactgcatctgtatgctttcaaaccttttaaatgccaaagacggtaaagcatttggaaggaagcatctgaagatcaaatttttttttttaaagtgatttagtagtagcatatatttgacaacattatgtcttcaagtagcatatacttaggccctttgtcatggcactaatcccttatatgacatcaatgcccctatttttgtgcttatccatgtgtagtgtccttgcgattacaaattcaaaatatattgccatcctccttatacttctgatattctgttgagatgaagatcgtgttgctggtgctattacttttcttttatgaaaattgttcctgatatttggatgttaaccaaagtaataaaggaaaaaagaagaaggtttagatgtatcttgtccttggcaggtttcagttattgaaactgaaggacccaccgtttt

SEQ ID NO: 14230 - DNA, 1831 bp, Aquilegia coerulea
  Intron number 8 from transcript AcoGoldSmith_v1.000282m (l ocus AcoGoldSmith_v1.000282m.g) derived from phytozome v7. 0 (chr-ID scaffold_4; pos 7904860 to 7906690)
ctgcaaaagaggtaaactcgtagatgaacatttatcttgagattcatgctacatgtgacttcaaccttttttttttctccattttcgagctggcttgaagaaagagtttatgaattttctgaaatgcaataatttgtattaggttctttagtaggctttggttcacttttgtagttcctaggactgaaatttgtgttaggtattcaagtttcattttattttaaagtttaaacagaactacttaacttagttttacatcatactatggatgtaattttatgcaagttgaatcacaatatcagctgagtagaaacatcttaggaatcccatttatagtatcatctaagtctcatatagacaaatctaagaattttggtagggatagaatcgatagctgacctttgatttccgaaattatgggaaagtctgattcgattggttggctgaatttggttcaaatcgtagaaagttatcttattcttacctatttaatctggtagacatttcagtatatgtaatatgcgattgacatatttaggcagattataattacagtgatggcaactactgggaaaaaacacatttagaagtccaccttaggccatttatggattgggtctagggctatgtgacatggacacaccaatttattttattaaacaggaaacctgtgttggacagatagacagttcatacacatagaaactgatgtgtagcatttcagttcagagtttcttttgaatcctaaaatataaagaaaaagtgagttgacttaaggttatattccctcttttactcataattcatatcaaaaagtaaaggaaagatgagaatgagagataatattttctttgtctaaatcatttgttggaaattaacaacagttttgtgtcccatatttaagttctttcaagatgctgtgtcggagacagtacacataccttacctgtcattgtcacttaggtccaggggaagggtggaacccagaactccttggtcaaagtccaagccatgatgtagatgtgtaaaattaacttggtttaagaccttagtgtgttggaattctacacaccaacccctgtcagtatcacataggtccaggggcagggtggatctcaagaactatttagccaaagcccaaactatggtatggttgtatagacgtgtcaaattgactgtgcctaaaacctaagttgggacacattgcaggttaacctaccaagtttatgctgaatgtactttggagtttgaagattgatgttggtatgtgtgtgccaaggaagggagctctacaaaaaataaaaaataaaaataaaaatcatgtgcattgtaacattattttcgttattttctaatgtttttgtgtgtaggggtggggtatgttgttaaaaatttgtttgtttgtcataaacccaaatcaagtctcaaggttaactttaagggtgatattcacccatgggccttgtaattggttttgataatgattaccttactgacttagttgctgtttgttttttattttcggttatactagcccctactcctactagtagcttataagctactagaacacccaaaagtatgtttgtttttaagagcttataagatttaccagtagaaaatggctaatagggtggaggttattataagctccatccccaagcttatagctagcagacttctaaaagcttataagttactgctaaaaaaacaaacagtaccttattgaactgcaaggaaaacaagcattgttaatttgtaatattgtaccatctaatttgcatttcaatgtttaggttgcttttagcaaggaagtccgtacaccaagtgt

SEQ ID NO: 14231 - DNA, 2445 bp, Aquilegia coerulea
  Intron number 4 from transcript AcoGoldSmith_v1.010417m (l ocus AcoGoldSmith_v1.010417m.g) derived from phytozome v7. 0 (chr-ID scaffold_20; pos 3876281 to 3878725 reverse stra nd)
aagcaagaaaatactagtgtgagtttagcttcttatcatgttttttgatttcattgttcatactcatgcacattatatgcggttattgaatggtgctatgatctttttgtgatttaatagtagtgagcgcgaatgtgttttgaaaaaagtcttatttggagcgaagttacatacatacttaaaagttaaaaccaatgcaatttgttcttctgtcgtcttccattaattattgctgtcgagatatgatgccaaaattgttttgttcgttaatgaaggttttcattgagtgatagggtggataatatatcttaattcatatattgtccgatcacttctcattcccttgctgacgtatctatacaggtttttttctgtccatttcacccttgctgaagtagacaatgagttgtatgaacagaaaactgcttatacttcttcctgctaaattgaacttattctttcggctataaaaatgctaatgcgggaaagtcattaaggaagtcgatcatagcaccccaaaaaaatgattatgtggttttcattgagatagaatatcaggggaatcttgtcaagacagattaaattggtgtgttgatagttaaatgggagtatgggacatgatgaaatggaaaaagtaaacggagttgaaaacagtctttccacacttatgattataggttatgaacaaactagtataaagtaggtcttttgtactagcaatacttacttgaaggaatactcgttctcgcttattgttggaaaccataaatacatgaaccaccacgaactcttatagtaatataacaatatcatcctaatttcagtgttaatgtgtttttaatgctttggtgattgaaatgttaatgtgcttcattgatttgttttctttatgccaattgcttctttgatctcagcctttttttccctcctcggatacaaactacataagatgccttcgtcaacaacttttggcactgctcccaaaagctcttgtatattctcaaaactcttcatttatggagatggttctaaacttctgtggatctttttcatcatcacatccgtacaatcattattatttgtggctgatgtgcacatgatcttgtctatagcattgtattgttggggtcatgttgcatgcatgaatgatttttttttttttttttggttatgtttttttaagagaacaccccaaaggatggggtggggtttggctggacccctatctgtgtattaattaagcatataaaatctgtgagggggaattggggccttggtgccttgcctcacttcaagtattttttttttgttaattatgtttggtgaagttagggtgtgagtggaagcattctattaagaaatagaacttacaatgcagatatagttagaaagatggatggaaatgcacgccctaatggaattgtgtggagctcccaaatactaaattactattttcttaagaagaaatcaggaagaacacaattctattgataacttgaaccttacacttgacccttggcaacttacatacttataacaaggtgaagtacactctagaatatctagatacttcactaccacagaatattcttgacaaactcatttctaacaagcactctagaaatatcattctactaatttagatctatctagagattacattaaaatttcaaattacattttcaaaggttaggttatttagtgagttacttgatgataactttatatcactgttaccaaattgacttcaacacgtcgtatgtgtaattatactttgttgatctatatataacagtatcatatgctgtaatttatttaattttgttatgtatctcatttaacatatcattattatttgcagtttttagaaaagattttgatcaaattgattaggttgactctctctgagtctgagacttcctattaaaactcatgataccttactaaattaaataacttttcatctgatgaatgacgatattagacatttagacgtgatgttttatgaatagaaatgtttttatcgttattgtaagtgatatctggaacttctaagcaaataagttcccttgtccacaagtttagaacaattcatacaaccgctctaaatttgaaagtgcagtaaacacataactgacatttcatgtacacctgtgactgcattgctcatgagagaaaaaggagtgaagtaagaactatagttgcagtttacaacccattatactatatatgattcatcggtgttgatgacacaaagaagctgcaagaaacaattttggttgggggattcaatttgggtttgacgagcaaaatcttctttgtttatctttatatggtatcagttttgggcatcatattatttgtattatctgttgtctgcagagtttattctcatagtaattgatatctactaattttatatatttacttatttaatgcaggcgg

SEQ ID NO: 14232 - DNA, 2877 bp, Aquilegia coerulea
  Intron number 2 from transcript AcoGoldSmith_v1.023257m (l ocus AcoGoldSmith_v1.023257m.g) derived from phytozome v7. 0 (chr-ID scaffold_9; pos 4818916 to 4821792)
gggcattgttcacaaaggtaagttatttgcttactgagtttatttcaagttttcaatttgaagcttgtgtgtccttgtttttttatgtgtagttatataagggtataaacacttgattttgcacgacgaaaacatgggatagttgttggcttattattacatttctgcaacccccttttaagcatagagtctttcagacaatgaccttattcgggaacttggaagttcatatgttttcgaaccctcttgagtactacattttgaaggataatttaagaggtggaggatgtgcttatcctgaagttcgtatggattaaattagggtttcttcatctactttagcttcgatagactaacgtaagaagtagtatgctgggaatgtaaatgtcttcattgcgttgtgatctgcacttttctttttgttgtaatgtattctctcatttttatacttcgtgacattatttgagtttatgttcagtaaattatctgagtctatgtttaagtcccacaagcgcagtcccttcaaatgtttttctctgaatattgtgatcgtattagacgatttcctttaccctcacagataacacaaccatgctccttctaaatggttctgtcaaaagcaaatggtaagatggggttggagtcttggagaaactattttttcaaatggtgggttgggagaaaagtgttaccaaactagggaaggctgccattgatggatgctcttaagtctcaacatattaacaatacactatgtcttgcttccctattccccaaagggtccaaatcaattaggattaaatcttattaagttaagaatttgagcttgttcagttgcattgagtgatgtagggccattgcggagttagaaggatgagttgggttagtttatggtgcaattacatagatagaagtgtcgaatcaggctttcggcgctcaatattgaaattgatactcatcctctaatagatggtccgactaaagttatttcattcctatgagaaaacatcataaataaaaacccattactgcgtgacagataattatccttcattcggcaacattaactactaaattaattcatacataaaagttctcagagtcagttgtgaggaatggtgacaaggtctgttagacctttccttgggggaaaatgtcaatgagttagggaccagcataatcttcttgagattgtaatcaaatttcttatgccattagtgggaagatcatcatgtgatgggacccaaactaaagtatttcataaagttgatttacagatactattgagtaaacattctctagtggcatgagtatcaaccacttcctttgccataaggtttgaggatccaccagcagttgtaaagtggaatttcttatctgggatttttattttcacaagattacatcagagttctgaagtccttaaggagtatgcaagatacctgcataccgcatgccctgtttcgcctgacatattgagttcatccttggtcagttaatcagatttagcatttactgggaagtgcttagtgtcaaattatttcaaaaataaaggtctagtccataaacaacctttgttgcaggcccggtgggtatggcccattcttagtgttttaccgacttgttttctagaattagcttgagttgtattctcttaagtatgaggtgtatttatttctagaaactattgactaccataggtggagccaatgagatttaggcaacacttatgttttacatgaactacatatggttagaaaaaaatcaagtgtaaaaacaacttaacatggtggtgggttgcttaccgtacacctgagaaatgaaagtcgattgtttctagaaagaaatacaactcgtgcttgagagaatacaactcaagctaattctagaaaacaacaagtcggtaaaacttgttttctaatgataggccatatccaccgggccggcaacaaaggttgtttatggactagacctttatttttgaaatactagaacacttagtggttggtatttacagctcctgtattgcagccaagaacatatggttgatagagcattttgtagtggttgttaagtggatgcgatagaagaaaagtggctatattttcaagacggaagagaggatctctgtcatagaattctcaatagcagtaaactattgtgtaaatgcttctgggggttattatatttgggagttcgtatttgatagaatagctcttgtgcttctcttcttctgtatgtgcccctgaagttgttgtagtagacctgtagctccgtgttgagtgttgcacagctgtttgctatctttgacaatacaactgtaattgttaaaggaagtttgttgaaccttatttaatttgctgatggccgactgttgtgtatttttgaattggcaacgactaaagagggcttagtttcaaaaccaaagaagaaaacatagatatctaatttttcagaaaatttgtcccttttctttcttattaaatcttagttgaggtaaagcctagctattaaggagttacacgtggaatacatagtatgtgactcggagacaaataatgactactggaaggggtttccttgggtggtaatgcctcttggtaattgatccttattatctttccttaatagttagtgccttagtggtaacgtttttttgcttgaacaaaataaaatgaataaaacagtacttgatagtaaaaagttaataaaacagtacttgatagtaaaaagttaatttgcgtctttactagttattctggtacggccagctttttgtacttttacctaggctatttgattgttacgtctttgattatcttcctatgatcttcagttgatggctgtaaacttgacttacaggtttgggagctgcag

SEQ ID NO: 14233 - DNA, 1333 bp, Aquilegia coerulea
  Intron number 7 from transcript AcoGoldSmith_v1.027452m (l ocus AcoGoldSmith_v1.027452m.g) derived from phytozome v7. 0 (chr-ID scaffold_93; pos 418685 to 420017 reverse strand )
cgagtgcagatacagttagtccggtgtcggaatcatcaattgagcaggacctaaattatagtatggagtatttaaacaacttggaggtaattttcattagaaaaacacaattagtattaatttaaattcgttttttatcatacacttaccactaattaataatgtacaggtctctggtgtccccaaccatttgttagaattaaaagttggtgtacctgtaatgcttatcaggaacatcaacccaagtaaaggattgtgcaacgggacccgattattagtaattggattggagccaatgctaattcgggcaaccatcataacaggtagcaaaattggaaacaaggtcactattcacagaatcatagcgtcttcggctccgacaaagtgggagtttatattgcgaaggaggcaattcccactaaaagtttgcttcgcaatgactatcaacaagagtcaaggtcaaacgctacaacatgtaggtatctatttacctcggcctgttttcagccatggacaactatatgttgctgtttcaaggattacaacacgtaaaggtttaaaaatactgatcacgcaagaagaagatgaaccgataggttacacaaaaaatgttgtgtaccacgagatatttaatggtttacctacaggtcagcaactttctttgtaattagttcccttctcccttctccctgctctaaattttacttttgtgtgcattgattctttcatttttcaatatctaaagattaatactttagcaatgtgataagatttcttttcgtgtgcactttttaataactgtttacaatgttattttctcatcttcctaagtgtatgtatatgagcaggcacatcattagatgaagaccaggaaattcaggtgtgaatctgcacacagagaataatgcctttttccagtaagtcctgctacatgttctcccaccatctactaaggttgatattcaaaagaagaagcattaagtaattttatagtactttagttataatgaacttcatctgtaagatacttatataacaatcaaacatatttataatctttaattctagatattatcccttgataagttgacaaactaagacaattttgctcaggttgggagcaatattcgtggtcatgttcacaaagttaatcgtgagctcgaaggtaaactgtcgcactaaagagggatcgtttcattgctcattacaagaacgtcgtttcaatgcccatccctaccgactgtgataaaggaataaaactacacattgaagttttaaaatcttcctgaatttttaaattttgttcctagctttacatagtaggtaaagttat

SEQ ID NO: 14234 - DNA, 2558 bp, Aquilegia coerulea
  Intron number 23 from transcript AcoGoldSmith_v1.000329m ( locus AcoGoldSmith_v1.000329m.g) derived from phytozome v7 .0 (chr-ID scaffold_56; pos 1180537 to 1183094 reverse str and)
aactccaccttactggaaaaaatacttcactggcggtacacatcttatccagttatcctttgctttctgtgtcaatattattcttaaacgtttatagccagaaatgtgtccattgacataacaaattttgtgatatatattgtggtagttctttcttcttttgataaataaaaggtcttcattgatataactgaaagattacagtaagaaaatattcatgtatataatcagccagaggctaatcctccaaagaaaaccaccccattttacctgagtcacggaaatttaaatggatttagtattgtatgcagcaccccattgtgcatactaaatattacatcctcccataaagtattctgacgtagcggaagcgattaaaaatcaaaccttgaataacccaaggggaggtttgccttgaactaggtagcacggactcggacactgacacagactcggacacggacacggacacggagacacttgtttatcccaaaaattaggacacggacacggcttaggacgcggcaattaaatatatataaataaatatggtatatcaataatatattagaaatcatgtcatgtatcatatacattcatagttcataaaacatgaaagagaaatggttggaaagatattacaattcgtcttaaattaggacttggaaacagaacagtgtccaagaagtgtccaagccgtgtccatgaagtgtccagattgaacggcacatgggacacgcatgtgccgtgtcggacacgtgtccaagcagtgtccgaagcagtgtcagtgtccgagcaatgtctgacactgacacagtgaattttttgaagtgtcagtgcttcctaggccttgaaacaaggaagaactaatataaaactaaagaaaactaaattgtagagacaaatcttaattgtattgattgaataataataattgttttacaaagcatgactctttatatagactaaagactaagaccaactagcactaggacttcctaaacaaagaaatcaaaatacaaatcctactttgaattgtattactaatatcaacttagtagtaaaccaactattctagaacttctagactctaaattagaaattactaaataaaataataagataaaaagaaaataaaaaaaataaatttctgacgatgacgtcagcaatgacgtcagcactgttctgcatcatattcctagtaattgttcagataagctcctaggtgagaatagagcagttctaggcttctagatgagtctattctttcctttcaaattaaagtagttagtgtcatgactaatgcttgatcgtggttgtacatattgaatggtgtaaggagagtcttattgtagcctatcttcacttggtaagttcgtaggatacaactgctgttcacgcttttgatcacatgggttcatgttatggaattgtatgtattgatttgagaggtaaacgatcaatatatattaaaaggaaatatatatatatatatatatatatatatatatatatatatatatatatatacacccacacacacacaagagtacaagggataagtagtcccaaaactactaaacataacaacaaccccctactacagaaaagaccctaccaacaagactaagctcctagcataactgtgtcccaagagaaatcaaaggccacaaatggaatactcctgattgtttttgccaagacaatgttatttgtattaatggcttttttaagtctttggtgtctagcgcttgaggttatatattattatatgaatatacagggattttagcgcttgattatatatatatcaacatgcttcttacatgtggcttgacttgagctagtatgtggacttactcaattggtgacgtttaactagtgggttgttgagcacgtgaactgatttaagtgggtaacttgaatttaacagaatggcattgcttattttgtattagcagcttataaaagatgctttgtgttatggagtcttcgactcaaacaaatttgcaatgattggggtgactttagcgaaatgttaatttgcagggctttaaatgccctatgctgtactagatatcaagtccttccacgtgtgatatgacttgagcctaacacgtggactgaatttcactgggtgacataagctgggctggtgggatagcctgctctgataccatgtctgaccaatggtctagaaaacaacttttgaaatcaagacgagtctatatatatttaagtgtgatatttgtatattgaactttcttagaattttaatatctaagtacttgaattattgaacctgttgccgcacgcttaatggtgctaataacatatatactagagttaagatacttgctacgtgtagtctagtagtatttaatttcttctttatgatctcatgatggaacacttgataaccaaagtgtatggttactggtccttcattgctactcgtggtctttagctaattgaacaagtatatcttttggtggtgaaagaagctcaaatatttataattatatttagctgataaattattgaatccctgcagatct

SEQ ID NO: 14235 - DNA, 2939 bp, Aquilegia coerulea
  Intron number 2 from transcript AcoGoldSmith_v1.011730m (l ocus AcoGoldSmith_v1.011730m.g) derived from phytozome v7. 0 (chr-ID scaffold_7; pos 3264661 to 3267599 reverse stran d)
ctggtgtcaggtaatgtttttaaacttagattgaagctgtattttgtaatgttcataatgattgatttgtggtttggaggtttactctcatatgaattgagtttgttagattattggatttgtattcgggcctaaagtttgtattgtcagacatttgtacactgtacacaacaatattgttttgcctacatatctcatgaaattgtcgatatggttcaatgttgacaatgactttattaggagataagaagtagacatcattatatgctactttcacatgaacatgtggtcaatatagtttagtgtttatgcaacgcacgctgaggtgaagataggtaaaccacatctttgcaacttgacaaatgttatgctaaccaaggtgtagtaggtgccacaagccgtgcaacttatgtgcagttagcatttaggaaaatatgctagggccatttttaactaaaggttgttttggattgagcttattctttacttctaaacattgttatggtaggccaatttttaactaaaggttgttttggattgagcttattctatacttcgaaacattattatgttcttcgaatccatctaacgttatttgtgtttgatgtgtttgggagagtaatttctaattgaacatgtgtatataagagataatattaggataatgaaataaaaagaacaagaaacaacggaaacatcaacaataatctcacaaattaaggacaatgtcacatgttgcctcaagaagtgtaagaaaagaacaccttaatgtctttgtgttttttcctatcaaataaactcaatcattttttacaattagtttttcttgctatgtttgaccttccctttgagtaggaaagttgctttcaatttcaaagggaaacaagctaaatattcattttcagaacaaaccatatctccatatttcatatctttttgtaagaaaagattgatattgtagataaaaagacggcttccaaattttatgaacatatcattattaatgtataatatcagtgaaagaatacagaactaccagaaatctcgaacgcattgaaaaagaagattaaaagttgaggtaatatacggttaacatagagaaaagttggagatatggtatctggacaggttttgatcaagggtctaaatctaactgatgatattatggagccaacctgcaattaaaacttattagttaattgttggaggatgtactcaagaccacctgctgtgatgtgatggtgatttagagtagtgaggaatatgtatcttggcagagattttacaggtgtatcaaataagatatattacatatgtatctagttttctataatcttaggccatccttttgaaatggatctcaaatcttttctattttgttgatcgatatccatagtaaccaacattaggtgccgaagatgctgatcttggaaaatatagactgagataaaaaaaattgaaggttatcttctttaatggaaacaagaaagcaagtagcagtattacatcttgggaatacaattatttgtcaataaagaatgccccaatacgtggtcagatcattcaagcatactctcttcttaccacttccccgataagccaacaccagcatgaagctttagtgttgatagtcactctcttcttacagctcattccttggaatccaggtacctcaacatcacagttgctggaaccagatgccatatgttgtccaaaacagtttatctacctctagatttttttttcctctagtaagtgatttgattccatctgggcaatggggaaaaagaacgactttggtaagacagaggttggagtggaacctctttgtgatgaactttctagcgttttcccaccatagagcaactaagttggagagctcacaatgttgaaaacaacaatttatcactttccaggaatattttcactcgatatggttttgccaaaatttctttggtcagtccggtaaaggaaaataaccctcttcccactgatctaaaatgacagctgtgtaaaaaaattggtttggaatatagattgaattacaatgggtgataacttaaacttcatttcagggcagcatgatagtttagtctgaagttgtaaatgaatcctgcatgtgaggagataatgcttattgtggtgcttgctaagtgttctgtccaatctgcgtgttttagcttttgtagttgtggttgcacggaacttaatggatcggttttaaggttcattatatagattttatttttatttttttttgataaagtaggagtatttcattcaatcattatatataaatttcttaaaaacgctgaacttaacatataaaagatgcgtccacaggattatgtctttacttacaaattcttgtaacatcttcagtttctattttctttttcattcttttttgggttaaaaatgggttgatggtaaaaatatgttctgaatatctgaatacagttacgtttcttaagaccttactccattgcgagatatgacaatgttactgttagagttccattgttgaactttgcatacttgtgcctcctccctgtaaatggctctcgtctctcaattttttttatgaactatgtctattatggaatatagcatgagtcgggaccctgttgttttatcatgttagataccgctacacagttctacagattgtgacgtctctgccatcatataatgagttgtcaatgtactatgtacctgtgtttgcttttgtaaaataatgaggcaccctctaatttccggtttcatttccggttctacagattgtgatatgaatatttagtttcaatcttctctgccatcatttactgagttgtcaatgtactatttacctgtgtttgcttttgtacttatgaggaactctctatttctggtttcattttgcagggctaacgctcagcagcctaagctttttgttggta

SEQ ID NO: 14236 - DNA, 1538 bp, Aquilegia coerulea
  Intron number 9 from transcript AcoGoldSmith_v1.004753m (l ocus AcoGoldSmith_v1.004753m.g) derived from phytozome v7. 0 (chr-ID scaffold_1; pos 617345 to 618882)
ctcgagctgggactagtccagccaccaaggttacatctttctgtattaatcttaagggctgtgtcttatttaaatttttttgccttgacatttatccacactatcatacttcggatcaaccaaaaataagatgtttcttagcaaatagattagacttgatttccatgctgaaattgtctcaaatagtcaaatgcatgtccgccacttatagtaaaattttgacaaccatcctctctctcctcctttcctttactctatcattgttatcctactgctacgactagtaatatatcataagtaacttggacacaaaagttttaaaaacacatcagtgtcacatatgtttgacactggaatgagggttaatatgtggatatgtcttgtgcaactacatataataaagaaaaacgaaaaatgaatatgttctaggggaacaaagtacttacacttcaattgaatttgttggaattttttattatacagagtgaagtgaaaattaattggcctatcctatcattaggccacaagagatgacaacatccctacttgttttggttaaatttgcaaagcagttttatcgatcatggttttcataatgactaaaactctcaactcaaagtaattgtactgtcataatcaaaaagaaaaaaaaagggagaagagagagagagagatagagcaaggataaggaagaaagaaagaggaatagaaagcagagatagctttgccaaattaatgtttgctcatgggtttataaaatatatttggttggatcacttagatattctgtatatcaagttttgccaagtaatgcaagtattttctagatttttaaagtcaggaaaaaataagggatagaggacaggtggggtggggtggtaggggaaaaggttaggggagatatagatttgtcaaattagggttcttaatgaagaagatcaagccaacttcaaatgttctgatttgattaggggatagagataataccttatttggaatctgttcgagattacatataatgacatacaatacttgttttccctggagccagcagatagttatcatctggtttgagttaaatgagaaatgattaaaatctttaaattatttcaaataatcacctctgttgttaatacattcacatcgtgtatttgaacttttaactaatttgcatgcctcttggagtcttcgtgattttgaaaagcaaaatgattggacggtctagacccgttttaatgtacacatcaataaatcttgtgtttcctatgttattgtccattcaatatgtgatgagatccatactttaataactaaataccaataagattctgtatgttaaaatatatctgtgttacgctccaagtcagatggtgacatacatgcctgtactgatgttagtggcatatatatatatataggattataatgataaatattcatataatttcatgtatactccatgtatcagagggtgactttatattctaatgttgcggagggtgttattttcatggttgagcaggttgagaaggctcata

SEQ ID NO: 14237 - DNA, 2212 bp, Aquilegia coerulea
  Intron number 5 from transcript AcoGoldSmith_v1.008324m (l ocus AcoGoldSmith_v1.008294m.g) derived from phytozome v7. 0 (chr-ID scaffold_125; pos 199882 to 202093 reverse stran d)
aaattcattaggtgaggaatcagctaaaatagtttgtccattaaataaaagactcgattcctctttcaagtttattctatctgggtttactttgttgtgacaagactttagagattattttatgcaacacaactgcttatatctgttagttaacgtaggatttctttcgtctcgtcttggatatctacaattgcatccttgctaagaagtttatcttaaacatgtgatgcatctgcttgtttagtcctaacttatttctgttaagtgcttttaagatgcctttaatcatgttaaatattggaatatttataatagtgtatgtttattcaagattacatgttagtaggtaccctcattaactaatatttatcgagatctggtggcaaaattttgggagattatttatccaagcatttgaaactgtggatgactatctttagggaaattatactgacaccgcgctctttacaaagagctatcccaaatcataacagcaacctacaaaaaattaaattgctcccaaaagctcacatatgttaagagccacccgcaattaaagtgttgcattttgtattacagatggggttttcttttaccggtcttttttctccaattctaacctttttcatatttggtacttacagttatatttcatatatgagatatttttgacagtactcagttattttcatctacttatttattttttcgtagtttggtgtttgactgatccagtagtaacatttttatgtcccattcatttgatttacaacgaagagaatcatataataatttttattttaacaaagcaaaacacttgatgcatatgagtgggcacgaatagctcaaccaaccaaaaaacccagaatcgtgttttaaatgaaaagataaaaatagcagagcttatgatcgccttacaaaaatacaagttcattgataaaccatcaaatgaattacaatattaatccattataattggttgatcttagcaagtttttcaaagaaaacaaagaatactgtagtaagggtttgtagtaattagaaagaaggaaaggttgggtttggtggtggtgaagaagaaaggaaaagaaagagaccgggtggcacttagcagtttgggtgtgctaatgagattatagttttgggtggactgatctaaagttttgggatagctcatagtaaagagtcgggtttcaatatggtttccccatctttattagtcaatgataaatcagatatacagaccatgtccaaaagatcacttatttagtagtttataaccaatatgagagttataatacagtcgatatgagcatggaataacaagctaatgaataaccaatcctaattaagtagaaaaaaagatttatgcttctctacttagcatgccaccaaatattcattattaaacactcagaatggagctgcaatatagtaaactcattttatatttttgaacacttctctacttacctgctcgtttacctctcatctactgtctatttttggggatttggcaacaatggattggtgatgggatcagggtgtttggggggactgggaggggggttgtttggagtctggttggaaattgttataactaacatcttgtttgtttttcatttcttgtccaatgatggtgtataagaggaaataaacttccattcacaaactggatacttaatcacccacgaacatatcattgcagtatggtcgagtttcccaccaggaaacaaacattcattgtatcaaaacaagaagaaacaagctattaactgcacaaaacttctaaggaaattatgaatgttgatagcttgtttcttcttttctttgcagttcattgtatacgagatattatagcaatggatattaatatgttgaatcagttaagtaaaacgagatattaacaaaaacttcatagaaaaggcaagtgatggccttgaataccttcatacaataaacgacagcaaatgtgaaatacttctaacaagactcagattcaacgagctcaactttaacttatcatcaaacccatgacattaatgtgataagtatctttgacgctttaataagttccaccctgagtgatatttgctgcaaattattatactcaacagtgcttaacccaagcactggttaaaaggtcataaaaattttaaactggttttggaactaaccttaatctactcttctatgtaatgtaggtctaaat

SEQ ID NO: 14238 - DNA, 1516 bp, Aquilegia coerulea
  Intron number 10 from transcript AcoGoldSmith_v1.001130m ( locus AcoGoldSmith_v1.001130m.g) derived from phytozome v7 .0 (chr-ID scaffold_3; pos 9997683 to 9999198)
ctagagcaagggcctgcttagaaggatcttctcctgtaagttgcacatttagtatttttataattgatatttgtttattttattattattgaaagacacatgtttttggataaatacttgaatattaggcatggtatctattaagagccagctatagtaatgatatgtaaatatctcatcatgtgggccataattggtgtatttttttgtggtacatattaggggccaaaaattgcgtgccttttccctttgacaagaactcatcttaagaatactaatagctttcactaggccttcaatggactcctctttttcgaaactcaaatccattatcacaattttaaaataatttgggtcgtttgttttgtcaattgttctcctgtatcttcgatccaatggttcataagcttctcacattgatcaaagtgacgcaggaggtataaagatgacgtcacattgatccaagatcaatttcatattttgggatttttatggaatcgagtgttagacaagattgctactttaggtgatgaagccttgttaggttagttattatttaaaaactagtttcttacattactgaggaattatattatgttattctaagtattctaaagttattcagatcaatataggcttcttgaagtttattaggggtagaaattaggtatagctttcattagttggtttttaattaggaacccaattgaaaatcgtaattttattaattaaaacacttagttacctagatatatttttgttgttatggattggatatgatgatttagagactgaactcaaagcgagagttgctcctctcccttttgtagatcatgaaaatcttagttgattcattatttattaaatcgacgttcttggttgaggtttgcttcttgcttaagtacatgttgcccactctccagtgaattacatggaatatactgaaacatatttatactctacatcaacattatttttcattgttggaaaacattataacttttaacccctatgagcaggttacatcttgaagcacctgtcaaaatctttggtacgctattgagtcaaatataagtatataacaaaaacatatgttgttagaattgtaggttttattgaaattttgatatcttctaataatataatttaaatgcaaaacaagctgcattgaccctagttatttgtgtttaaaggttccattctacctataatgaaagcaaactcttttggaagtgaaagagacttctaatgtggagttgtggatcatctttactctgagcaagtttgttctttgagttttttgtatttttttcatagttgatcaaaacttttgagattttgtgaaggaggtacagtggtaaccatctgcatgaattttcttttcatgtaggatttgttaggcgttttaatttttaatggttaaagtatccctttcattcagatttttgcttgataagctattaaaccgttggcactttcaggcccctgtctaccaagaaccctcccttactatcgc

SEQ ID NO: 14239 - DNA, 1600 bp, Aquilegia coerulea
  Intron number 11 from transcript AcoGoldSmith_v1.024658m ( locus AcoGoldSmith_v1.024658m.g) derived from phytozome v7 .0 (chr-ID scaffold_125; pos 117365 to 118964)
gtttcgaaaagcacagctactgggagcggtaggtttgaaattttttggaatcttttcactcacacttaccaatttcaaggacacttagattgctaagtaacacaacagctgagtgaggtccatttgggtacctatctattttcttaaaccaaaatggtggtatcctgtagctgctgtagagctacatatagacaatcactcttgtactctaatatctcactgtgccttgcatctgtgtactttaactattcaagaggtgaccatttatgcaaaagtatacctgtatagtatttaatctagccaaaccattggctcagcatgtttttacttctcttgttttgctcccacattctatctcgtttggaatttgatagtttcatcttaaactgttcatttgatctgcagttcaatagtttcatcttgaacagcattccagttgtggttacagtgatttcatttggaatgttcactttgttgggcggggacttgactcctgcgagggcatttacatctctttctctgtttgctgtattacggtttccgttgtttatgctcccaaatctgataacacaggtgtggtcttttcttctttgtctattatgtttcttagccattttttttcttgggataaatgaaggattttcattgatgtaattaacatattacattaataattagcaaccagctaattagtatagacctactttcttagacccataagaactgagtcagttatgacttggaagaataatttaatattacccatagtattagattttttttggtttaacaatctatcgataattttttatctgaatacaatgaatgaaaattgaagcttctttaatataagagagtcatgctatctacgccaaatgatctgtcacttggttcagtagtaggtcagaagaaacaccgtcaaagtagtaataaatgtgtgtcctaaaattttctactaacttttagtaggagttgagaaaataatttcatttagagattgtaaaattattcatgattggaccgttttctttcactgagagacaaatcaatgtggaagatcattttggtcctcagggtttagttttctgtagtttatcactatacccaaattggctattttgtttaattggtgcaagtgtttttcttttgatttttttttcacagtcaaggtagctctccaaatggtttcatagaatcattatttgatttgacacttgacaggttgtaaatgcaaatgtatcattaaaacgtcttgaggaactgttcttgactgaagagagaatactcacaccaaatccacctctagagccagggaatccagccatatcaataaagaatggatacttctcttgggattcaaaggtctacctactaaactactttgttaaatctatttcatgttttgcctttgacattgatggaatacatcttaatatctgaaactttatcagtgtacaaagcttgtattaatatttcatcctataatgcactttgattacaagcattcatctttccatgtttctgtgtttgctcgttgaaagtaaaattttcatcaaacttttcaggcagagcaaccaacattatcgaacatcaatttaga

SEQ ID NO: 14240 - DNA, 815 bp, Aquilegia coerulea
  Intron number 1 from transcript AcoGoldSmith_v1.009326m (l ocus AcoGoldSmith_v1.009347m.g) derived from phytozome v7. 0 (chr-ID scaffold_7; pos 1852632 to 1853446)
acttctctctcttgctcttctgattcatcagttccgtaagctctctctctctcatagtagttcctagcgaggttgaagaaagtaaactacaaataacatattaatcttcattttttttatagatgttgaaatttttaattttttagaattgatgtttatattataagtatatatttgtgcacttgttctactttaaattagatacccaaacttttaattgagactgtaatctagcaaggatgccttttgcaaacagaaccttacactgaaagagtgaaagggggttaaatggttaagtagggacaacaataagggtgtttttgagaattgggttttttttgttttgttttgttttggaactaaagttttgttaaattgctaatgattaatgatagttttgatgatgatgatcatgggtattatgtcaaatttatttagttcatttagtggaggtatgattgacaatggacaagttaaccaaaatcagtgtggatgatggaagagtagggggacaagactcgagagaatatgaaaatacaagattagggagaaaagaaccaattcggcaattcttagttttgtgttatcatgttagagttatttgccatgattatatatttggtttttgtataccaattcttgttttttaattgtactcttgtcagttcccttctgaatctgaaattggaaacattatgtaaaattagtctgtatgtagacagtttaatcttgtgcggaaaacttattagcatagattttattcactcttgtaaagttcttgagtcaaaatccttccaggttaagaagcagttatc

SEQ ID NO: 14241 - DNA, 289 bp, Aquilegia coerulea
  Intron number 1 from transcript AcoGoldSmith_v1.007948m (l ocus AcoGoldSmith_v1.007948m.g) derived from phytozome v7. 0 (chr-ID scaffold_13; pos 4303805 to 4304093)
ctcatcttcttcttctttcatctggaattattcaggtatggtttggatttctgttttcatttcttgattgtgttaaaaacacagttcattcaatttcaaatactagaatctaaagaatctcagcttagtcaccttcttcgttcaagttgttctagttaaagattcgtttgaaaaggaagatttgtaggttatatatattcagattcagatgattatatatgaatgaatggaatgaaatgaaatttgttttatatcaatttatttaactttatactgtttgtttgtagat

SEQ ID NO: 14242 - DNA, 2291 bp, Aquilegia coerulea
  Intron number 1 from transcript AcoGoldSmith_v1.006448m (l ocus AcoGoldSmith_v1.006448m.g) derived from phytozome v7. 0 (chr-ID scaffold_72; pos 709788 to 712078 reverse strand )
aaacccttttaccaaagcctgaaaaagttaaccaggtcagctacaaacacatgctttttatttagttctacaatcttagcttagatggtattgaatagttttattgtgcagcccaagtaatctgatcaagtgcattgttaggataacaaattcaagaatagagttttgacttctggaatcacttttcatggaatttttgctagtcaaactggaaaagtattttgcaaattagaacttactgggatagattctcaatcagaagttagtggttctctatataggtcaacctattgctttttgtaacaatgttgataaatccatcaaatacttggtatgtgtattcagttagtgctaacataatccttcataggttggttcatggggggccaagttattacttttgcatttgtgagttccttcaatcctttgtattagcaaatgcattttgcagacaccttgtaagtaaaagctattttttcatcactataaccaacacagcatgccacattccactatacggaaagtcttaatattaaatttagttaactgacttatgatcttaaaacccatagattgaactcaatagaattagctttcctaaagtttcattgcttgaagcatacattccatctgatatattcgatgatgaattccaatgtaaaggaagaatcgtatctggccaagtttgataatatggatagttggcgtgagtacttaggcagagggagtcgagaccaggccagggcaaggacttcaagtattaaaaggcagcagattgactgcaggaaggtttggggattcaaaatggctcagttgagtggcactcctgttgctcagctggtatacaaattttgggggtcccaggtcctgcatctaccaagaaaagatcttctctttggtatattgtagctgctaattggaactccttataacaacgtatgcattctgttatcattccagtcggaagatcctccacacctgcctctctcacttgatttgatggggagactttcctttctcctttttttttttttttttttgattccttcatttgtttagccagaatgaaagcctagaccgctactttctttcctgctctctttgacaatccttatgaaaggttaagcctaggagtaagtaaggagacttaacctatatggatttgaacctaagattaagagagaaagaagaacaaatgctgagacaaacagaaataggaaaaggagtagtagacgagagcagcatcgacctagagcgattactcgactgcggttcggtgcttgtgtgtccttgggtacatcacatttgaaatagatggtgtgagtttgtgaaattcccaacaaaccgctacactagcgacacataaaccatgttcgtcaaccaagtctattcagtggacttaacatctcttcggggcggaaacggacgtggccaaaccatatagatatgtatcttcttggatagagatatcaattgcagaattccaaaagaattttagaaagaaacactagacactacttaatgtacaaaaaagcttatcaaacaacaagggctatgtttaatgtgacatttctttttcaggggttttaacagattgttgataggaagtttatccttatcctaggacaaaatagttatatgaataaatggcatcaaccaatacaaggttattagtggaggaaaatgctatcctgggttcacccccttaataattcattgcttcagaaaatcctatcctagaagtttcaattccatgtaggtctattattactcgtgctgggttgtataatgtgacaaaacattgtctgctggagcattagtactttcttgtgtgttctgttttcaaaatttaatgtggcccaaatttgtatttgtatgttccacatattatcttcgtttgtcactgctcttcactgtgattcaagagttctagtcctgagcagctattagtggaggaaaatgctatcctttagtgttttaggtcttagatattctccagtattcttgtgagttcacaccctttgatatttcattgctactccaggtcgagcgcgaaacatgtgcaatatcttttattataatacttaacattctgctcatctaatggttttctaatgaaagatatttttcctgtacgttgttttcaatatctaatgccagtgattgttggttgccattgtatctatcatctgtaagtggaatttctattccggttatttgctttccttgtaatgaatttcatgttttatgtatcaggttctttttacttcgaggaatacatatatacttgg

SEQ ID NO: 14243 - DNA, 1676 bp, Aquilegia coerulea
  Intron number 8 from transcript AcoGoldSmith_v1.002597m (l ocus AcoGoldSmith_v1.002597m.g) derived from phytozome v7. 0 (chr-ID scaffold_23; pos 3563668 to 3565343 reverse stra nd)
tgcacttgctacttgccattttaggtactacagatttagttttgagatataaattttccttccactgtgtctctaaaagtagagtctttgtggcttgtgttgtcactgcaatgtgggaagcttagttgggggttctgtgaaaaatctctttttccatgaaccctagtgtgctgattttttcttcctatgtttaatcattattaattatatcataagatagtgtggtcattatttcgtaaatgttggaattttatgaattatttttcggttgaactgtatctttgatgtgttcgttttattattttgcttgaagcaaattactggttaccattttatcttattcagtaatgaaattagacttaattgaataatttgattactgttgcattagtttaatgatcagattaagatgtaaatagaaacaactagactcctagccaccctatgcttgaagaatcagcgttatagaagttttcagtttcacttccactatgcctgaagcccttaaagattacatagaggattttttataacttgtattccaatttaaagctcttaactagatggatttatggcccactcccagtcctccttcactgcccagacatgagaacagttttaactagaagcaggagaacaatagcaagagatagctccttaagaccaatagcagctacaggctcgaccacgacaaggaaaacagaatcataagaaaagctttacagactaagctaagatggaatggctactttgtttgtgttgtctactcaagggaagagcgggatacttagtggaaagggtggacaaggccgacgcgttcaaacgttgctccatagtaccctcctgggggtggggggcaaccgagaacaagggcggtggatgggacattgatccaaaagtcgagtacggtacgaagaagctcatttccttgaaaggctgtttaacgcaatgaatgataagcccttcctatttatttgcatagtgggaaatcaaacgaaagatgcgaggtgacaaatcaacaggagaggaactataagccttaagcgctaggcctgaccgattccctttcgtctctgcaaacatgggcggtgagaggggaaggataagaattggttcacccggttggaccatccccatgatacagaatcttttttgattcttcgaattagcctctaagggattcatttcattaggcggggagtttgatatggccacggtgccaagccttcccgatgtccataattgaagtgcttaactaaatggatttgtagagagttttttgcaatttgactaatggcaattattaggcttctaaaggtctgtaataattagttttattgtgtccacagtccacacccaaattggaactttacacatatagttaaacttgattattctagatgcctataattttgaatgatgctaattgagaatttgaggctagtagtcgaattattggtgttatagctcctggctggataagtttggtttttgccgacttaatgatctggtctctgccaggcaactcatgaaattgcatataagaaatgattcggcaactccagattttatattctatatgttgtacagatgctttcttccaacataatctttatgtcattgctgaaaggcttgctttatggctttcaggaagaagctgacacggttgtctataa

SEQ ID NO: 14244 - DNA, 1431 bp, Aquilegia coerulea
  Intron number 2 from transcript AcoGoldSmith_v1.018691m (l ocus AcoGoldSmith_v1.018691m.g) derived from phytozome v7. 0 (chr-ID scaffold_20; pos 2557639 to 2559069 reverse stra nd)
gtagaggaactacgaatcttgtccagaaggtaactatctccatctttgatttgatttagttacaagaaattcttgttttactttgatttcttgtggatatttgctactattagttggttattttaggattttgagtgatttagtagtattagttactataaatcatcccttttactttaagatccttgcatctgtagatcttgttaagataatagttctacttcacttgtacatcagattaattttgtaaatatgaaaaatcatcagagcattgattcattgattacatgttaagacttaagtgtacttcacttgttatgtacataacatttctttgaggcttgatcattttagtatctatatataatatatatgatagagttgttaagtaatgatccatgtgatgcaaatataggatttggtgttgttatattaaatatttagcttcttgactataatcattagctgatgcttgtagtttttgttcacttcccttcgtttatataagttagctagttaattgctaggaaccttatccatttactctgcaagtgatagtggatattaaagtaagcattaaaatgcataggaaagcaagataattgtcacatcttaccgactctactgaaatacgtacaagtgggttgtgaatcaactggatatgaaatagtcctgtgaaaatatgaagtggatttgaatgtaagtttctgatatggatgcaacgtaccgcagcatcctgaacatataatgtatgcaatgattattagaaatcgagtttcttgatgcattcatttattgatgtacatagatgagttaacatttaagtcaatagtagtttgagctaccaaaagtaccacctacttccaagctacttgttttatatctcatggagtttcatagtactatcaaagtatcatgctatgtagtgtaacttgccttgcagctataaatgttttactttgtgctgtattcagatatttgggcatgtgaagctgttaaatctgtgaatattcccttacagcatgatcaaatatgtagaataatcaatatattaaattcctggggaatacatgtatctcactgtgtgtgattgtgtttgtctcttgttgctttcgtgtttttgtctctgaccattttgtacgatcatctgaaaaataaaggtctgcatcttacctgattagtattctgattttattggcctttaacctgcttacgaaattccaaataatgagattcttagtgacgttttttttttcctcttctcaattttggcactgctaccatcgtatacgtaaacagtttggactccagaagttagtatctagtattgtcactacataaacagaaaattcattacaggtctttctgacaccatctatatcttacttttttgaagtgcaagttctgctcgagagaaggaaccgtcacaat

SEQ ID NO: 14245 - DNA, 2957 bp, Aquilegia coerulea
  Intron number 1 from transcript AcoGoldSmith_v1.018280m (l ocus AcoGoldSmith_v1.018280m.g) derived from phytozome v7. 0 (chr-ID scaffold_8; pos 4207859 to 4210815 reverse stran d)
cctctgctttctataatcggcaaattccaagtcaggtatgaagtacacttgtttgtgatttttttcatggaattctatcttgaacatattggcttcctttattttaataaaaataattgactttaatttgatgatgttagttactcttcttcttctgtgttatcgttgtgtattgacttattttattaggtttataaagagaacttaagactgagaatgaatttagactgtagttatccaggtgtatgaggatgactactataaatacacgtgggtttctttttggatggatactgcttgaaaagaaccaaattttagtcctgattgagatttggtatctttgtaattgagaaccagttatatgtagatgcatacagaggacaacctgtatgatgattccttgtagctatagtcttcttatgacttcgatcgatcctttgaacaagactttagtgatctaatagtttagaaatgtgaaagtcctgtaatacaaaccctaaagtaatttgtgggttgaaattctgtggttgaagttgggaaatctgtaaaaattgcctgccacatacagaataataaatttcacataaaaatttgatgcagttttagacaaacaggattggagaagcaaggttcttcatgctgaccgtagttaggtacttcggtatataggtgttataaaaatttctttctaaggaaagagatgttctttatcatttcaatgttaaaaaatttgcaacaccctttcttaaacttgtaactttaaatgtttgcccgttggaagtctgtgcagtttgtagaataaaaggtccattttgtaatttggagtctcttgcatgattaattttagactttagagaagttttattttgaggatgttatcattatattgcttaggtccctgcagtgcacttctgttttctttcccacttccagtgtagtctatcatcataaagttatgttaattgaatctgtgcctttttgtcttcaacctcatttacaccaattggcgaaagatcgtctttggatatatctataaaagaagcatattctgttcaagtatttcaatttgaagcttcttcttcaggaacctatataggcacatttatgctctactttatcgtacatttatgctctactttatttgcctaactaaagggaacaaaaataggcacatgttatcagatgtgagaccttcccttgtacgatgtgagtaaggtgtttgtcatgtgttactcttgacaatgtgtcttcaagcacccactgcccatctctaccgcagatcggtgcatgtgagtaaggtgtttgtcatgtgttactcttgactatgtgtcttcaagcaaccactggccatctctaccgcagatcggtgcacctgagaagtcgtcatcctactcttccatacggccaccacaatattggaggatcaaaatgtagattagttcacaatcccaacccatccaactccaacctaaccaaaagagaaatcttcaccagcccaatgcccaccacaacaacctctatggtctatatgttggtgaagtcatagagattctttaaccacctaattctggtcaaatgagaactggccatatgtattttttatgtttcttgtgatgcatccaaatcatctgaaggttccttgtaaggtctaatgagtttcagcgatccactgagcaagactttggtttgttaagttctatattagtcatcaagtgatccaagatgcagtgatactgtaaacctaaagtaatttatagataaaagatagatccacctctcacccattggtaagatctaaagttttgtttacttagtatacaggcaatatcatacatgaacgaaatattggtccacttctcaaaaataataatgtgagaaacaagattcatattgctgccttcacatagttccaatatgtcatcttctgagaatttggaaagttgcagtttttacgcaactactaggtcgttgtttactataacttactcagaatgggcaaatttaactgttaagtttatctaagcagaaggaatttgtatgtcgagattcgattgtcactgccgtaatgagggatgaggcctgttgtcgttgcaatttagattcagttttgtgacttttggataatgagttttttttttttatagcaactaggttcttgcaatacatttgtttgtatgggcttttacgcctccaacgaagaccttcctcaatagagtttagttttattcgtacactgttgtctttcttatcttcaatcattttcttcaattggagaatgatcctctatgttgagccatgtatatgaaagacgttttctgttattctatttccgcttgaggcttctctttagaacttttccaaactttgtaccatctttttgaatctttagctttggaaagtaaagctccttccaagggtatctttccttctttttgttgtgctgccttgttagctcaccattggtatctagaaattggaagaaggtctatgtctatttcatgtgtaaaggattatggtggaccatatcatgattcgatgagacggtttattaaccaaaaatggaaatgcttttaaaactttcgtctgtcttggcaatgtatacttccttcaaaaaataggttgctttggagtatttttaccattttctatttggtgccatactgccatttgggtagagtcgtagagagaaatttttggcacttgagggatgagataattttggatagcctatttcgtttccaaagatattctattattttctttgtttgactaactgaaggaataatctgtctttttcgaaactatatttggagtgagcgtgtctgttcatatatggttatatgtttataccattatgtgtttccttctagtttgttatctcattaatcattatacatgtagttctctttgctaatttctattttgtaatatatatattttttcttttgcttttcaga

SEQ ID NO: 14246 - DNA, 936 bp, Aquilegia coerulea
  Intron number 1 from transcript AcoGoldSmith_v1.002820m (l ocus AcoGoldSmith_v1.002820m.g) derived from phytozome v7. 0 (chr-ID scaffold_10; pos 756294 to 757229 reverse strand )
ctcttcaatctctatatctcgttctcagtaagtcataatcttcttttttggatctatttaatcaattcttgtagctaaactttacaattattagttttaccagtttaatttattgttattctgcgaatttgttaacgaaatttcataatttagtgtttgctaaagacgtgatttttataaatatttgtgaatttcgtttcagtagaccaatttatctctctcttgattagctctattgtgtatttatgttctgatttatcaaattctgtttaatatgaatatgtaaaattgtagagatagtatggtaacaaagaggaaataaggttaataggtcccttgtttttcatcagatttaaatgtttgacatttgtttcttagatggtgcttcataaaatacgacaatttgtggagaaaatattaacgggttatggtatgtcttggactaggatagaacttagaaggcgagtttgggtttgatgtatatgagtatttgacaagttttaaatttagttattattgaaagaaaatacttttctaacaagcatgcagtaaacgaaaggcgactcaaatgctgttctgttctcttactcgttaaagatagacaatatcaaacaaactatggaattttatttaagaaaaaatatctttgtactaacaatctggtattcgtggttgaatagtttaaatgtcacattatatcatattttctcatattcgttaacttgattgttatagtcttctgttgtctatccagttttgttatttgcagcatgtggtttggttttattttttctgtagtaaggatgtattttcactaagcaagttttagtagttcacttaactttagtacctgtctgattacttttatttgtataacttattatgttatgtaagattatatatattgaactttagtgttttctgtagagggcataa

SEQ ID NO: 14247 - DNA, 1325 bp, Aquilegia coerulea
  Intron number 7 from transcript AcoGoldSmith_v1.000373m (l ocus AcoGoldSmith_v1.000373m.g) derived from phytozome v7. 0 (chr-ID scaffold_14; pos 179446 to 180770)
tgaaagtttaccatcacattccactaaagactgaggtaagacagcatttcatttttaacttattttttcttatatagttgtcttgattcactttttagaatcgttgctgtatggttttctctaaccatgttttcaagattgtatgcctgggtggcaggtttaagtttttgtttttgggtgacaatgataaattaacagaatacaagagtttccctggcattaatagactgataaaattttcatttcttaccacctaatatagttcacatttccttcacattctttattctgttagatttaattttattttttgggtcaacaaaacatgtatttgcaaatgtaagccctacatcctgttaatacgtataggttgtactgtatatgataagtcatttttgatataccgggagttccttcactttcttctcccactgtataaaatctgctgatttgtggatatttgaatcatttcatttcattgatgttacaaaggcgatacatcgggcatgttaattgacctggttactcacatgttacattgtagtttgagaaaatggagggttggtcaaagcttaattatttagaatgactaaattaatgggggttatgacagaggggtgactgactccctaatatttgtccacgccacattgatatccaataaaaggagatgtttgggttaagtagagatttgttacacttcatctcctgctaattgtattggatgatatatggcgtcagacatcagatccttttgttggtcatagaagattgctcattttgtgcagaacagagtttaattggactggggaaataatgttagtgttgatatctgtagaaatgatgattgggggggggggggggggggggggaatattttatagttgacgcttgttatttagtgacatgagtgtggtcagactgaaattctttgaacttcataaatttttagtgccatgttttctacaaaagatagttcggagtccttcttttgaatctccttgtaagttatccagtgcttgttatttagtgacatgaccgtggtcagacgggaattttttgaacttcgtaatttttagtgttatgttttctacaaaagatagttcggagtctttcttttgaatctcttgatttgtaagacttagtatatccttgtaagttatccagtgctaaaaggcagttatgctaatgtttaaagaggactattaaacttatgtttttgtatagtagttaatgcaaaattgttggatcattatgtttttggatcattcgcaataagtgtaaatgaaagcttgccagctaactttccatcttgatgctgcaga

SEQ ID NO: 14248 - DNA, 645 bp, Aquilegia coerulea
  Intron number 1 from transcript AcoGoldSmith_v1.004292m (l ocus AcoGoldSmith_v1.004292m.g) derived from phytozome v7. 0 (chr-ID scaffold_27; pos 1108649 to 1109293)
gagagagagagagagagaagaaatctcaacttcaggtatacttgttacctcgttttgttgaatctctcttaaaagtttgggtttctgttaaacttatttttgttgggtttggtgcaactttttttttttttttttttaatcattatggacggttatcactcgttttctgtgtagatctcttgcaattctacatttctttgaaaaatatatttgggttttgcatttttctacaagatctttcagttttagcttctgggtatagcatcatttgttttttgccttagagatttagagtgaagtttggttttttctttgagaattttgaattttagtgtctgggtattgcttcaattgtaagttagaattcaaatttagagtataatttgtttttttattgtgtggagtgggtgaatttgttggtttccttcaaagcaaatactctagtttgaattgagttcacctgtcgttttttttttcctgttgatctgtttgaaagaaatttattctacatatttcatattgtttttctttgtaatttcttataagatttgtagttacaatgtaatttagattgttggtatatttgatctgatttggaattgcaatgttgtgtgttgttgtatgtgttaaagatcaaattgtggt

SEQ ID NO: 14249 - DNA, 1071 bp, Aquilegia coerulea
  Intron number 1 from transcript AcoGoldSmith_v1.011354m (l ocus AcoGoldSmith_v1.011354m.g) derived from phytozome v7. 0 (chr-ID scaffold_35; pos 2412917 to 2413987 reverse stra nd)
cacgggaagacaaagagatattgtttgtttggtgggtaagtaaaccatttttttctgcaattcttctctttctattatcttattttctttgatttttttttatttgatgaaggtatgtttctctgtgtttgttgattaaaataagcttgtttaataataatgatcatagttcctcactacatgcttttgataatttcttatgtattgtgatttattttgttggaaggaaagtagtttttgaatgatctaatgtttacaactttatattttgattttaaatttgacccatgggttttccgccaaggttataccaaattaccaccctcttcatatgagatttgttaggctgtaatggttaggtgattcttggagttggaatatgtttatgttcataagtatgggaggtgaattattcatggaatttttatttatttgttttttcttaattttgagagaatattgataatagggttaataaaatataatggtgaatagattaggacaatacatgatgtatgcttaatgcttagtagtagttaaaactcttaacttttaattcaacaaatacatattggtgtttatttttcgatatagtcctatcttttttgcttggataagtttaccgtttaacaaacaaattatattccattgagcataaaatactggtaatctttagcttggatgagtatttatacacttaactatattgaagggtacataagggttagatcccagtctatgtttaaaatctgaattgacgaacaatgtatatggtcaacttgttggaacattattttggcatgaatcaagtttgcatgggaactagcagatctttctggtttcaaaatattgttatcttgtttattgagtttgcatttgtgattctcgaaacatttaatacaagtagattcatgcacaaaaggacagatgggtatttcttttttagctaattgtgtatattatagctcaattaattatgtttggtatgcaatatgctttatatgtggtggattgtctctaagggtattcttatctttcagttttagctgcatcaattttactcgacaaaac

SEQ ID NO: 14250 - DNA, 1169 bp, Aquilegia coerulea
  Intron number 11 from transcript AcoGoldSmith_v1.002794m ( locus AcoGoldSmith_v1.002794m.g) derived from phytozome v7 .0 (chr-ID scaffold_10; pos 3027902 to 3029070 reverse str and)
gtggctgttagtacgaatcttacggtatggttatttcctttttatactcaaaattaaaaaaaatagaaactaaaacatgataaataaaattgtgattctggttgaatgctcttttattccatgttttgtcttcatttcaccttgcaaatgaggggttagcttctcctattgctatttgagtaaggcttttacaaagtattctatgtgattacatcttttttgaattgctggcactgataccctttttgaaggttattgttggtttcttcattattttgaaatgcaaattgtcacagactcttagtttattgaggatcagggcttcattttaaaacctattagttatgtatctgcaacatgtaatccatttcattgtttgagacacaacctcagtggtattttcagaatgtgctggttcttaaacatttttaagagcattattggttaatattttacaatgtcatttcttctcttatccttcttttcctctaatctgtttatcaaatttctaagactatccctaactcactaaaatggttttagagcacttgaatgaacttcttttggccttttttcttttcttttctctatctattcctttcttttgtaccagaaattaattttttcaatttggatcatacaagacaacaatttggatttggatctctgaggatctaagcgatccgattcaattcctccaacttgctatcgcatatgtatgcaagggaaatctagattagacatttcagatgaacctttttgttatcattctctactactactttgttatgacatatgaaatgctttttgtagcttgtgatgtatgttctttgattgtttccatgatattatcggaagtttctattgagataaaacatcccagtagttgaagtgtgactatagggtccatatgctaactttcccgtttgaaattatgaccaaactagttaacttgacaatgtggtcgagattgttttcatttcttacaacatggtttcaacttgagaaagtggttaaggtgcgctgtagggtccatatctgaagtgtaactgtagggtccttttgcaaagtttcccgtttgaaaatattatctccttggtgtgcatcgtttaataattgacttatgtttgtgatgtagcttgtagagaagtttggcattgaccctaaga

SEQ ID NO: 14251 - DNA, 1727 bp, Aquilegia coerulea
  Intron number 1 from transcript AcoGoldSmith_v1.016225m (l ocus AcoGoldSmith_v1.016225m.g) derived from phytozome v7. 0 (chr-ID scaffold_15; pos 424130 to 425856 reverse strand )
ttacttcactctggaaagtaagttcgattttatcttatgttatttgattaatgaaacttgttaatactttgttattagcttaatatgttgtaattaacattgaggcaagttaattgttaaatagtggatgaagtggagttggaatcaattgattagtgaagagagaaaagaatacagtagtatggagaagaatgtagtgtatataaattaattaccattggacaagtttcttagaagagactagaaacttcatatgcttgggaaatgtatgctacatcaatcaacgaaaatgttagagagtacttactagtgatatttctaagttccttttaggataaattgattcaatatgtgtctaaagagttaagaaacgtattactatcacgcctaaaaatcctagaaagatgtatatttgaaatattttagtttgttcatattaatttgtgcatgaaactttgaaagcgtattaatttcataagaactttattagtgcacaatagtcgatagaaaaacagatgaagagtacagccaaccgtcaagtatggcctttaattttaaggttgtacttgattttggcatggagtcgtgcatttgatgagcctatcgagtggcccactgatcaaatgttgaggaggttgtacccaaggtcatgggatttatttcaacttcaactaggcacatggaggtttgggttaaaggcaaaagtaaaaagagagtcgtgcacataatttttgaactttgttcctctgtggttgttttggaggacagttatgacagctaaacactgaatttgcaaacacttttggatattatcctgaacttatacaaaagcagtttcacttctacaatcaggcaggcatataaatatgggtgtcctcttgtgctcctcttggggtacaagttatagacatggttagcactttagagtttagaatttctttgatcctgaaaaagtacagtcgttgctatatgataggagcaggttgccaagtggtagttctgtacttctctgacggtcaaatttgtcaaaatttgataatgcagagataatttttcgatgccatatttggtttggcagaataaacattatgatgctaggataacatttagcaaattcgaaatgtggcatcttaagttgaccagaagagcaactgatttgaatagtgatatgccaacttagtcactgatatgcttgaggagctgaatattttttgggcctggcaaagggcgattaaaggatttaaaggttcacaaattgggatcttttttgttgtcattctatcactcttcttcttcacagtctgtactgcacagtgtatcatattttggtgatttattccataaatacatgaactaaaaggtttctgcaactttacaaacattagcctgagagtgtgttcaaggaagaagagtcaatcttcttcgttgaaaggttctttcttttgtggcaattaaaatcttggcttcatttttttttcttagacgattaaacaaattatttattatgcaaaacaaatttagtaaaccttcactcttgtttcatttttgtattagtcgtaaaattgaagctatggtttgtagctgacctttagttttatcttgctccttggctttaattctcgaaaaatttgtattatcgcactctattattttcgttactaatatcacgattcacatattaaaatcttattgaaggtacgggagtggtgacaggttgagccctgacc

SEQ ID NO: 14252 - DNA, 488 bp, Aquilegia coerulea
  Intron number 1 from transcript AcoGoldSmith_v1.009195m (l ocus AcoGoldSmith_v1.009195m.g) derived from phytozome v7. 0 (chr-ID scaffold_13; pos 2979377 to 2979864 reverse stra nd)
ggatcattttattccaaaaccaaagctgtgagttgtaattgttaattttgatttatacatatgaattgtttgagaattggatttgtagatctgttatgtcggtgaattttgtttgttatatgtcaaatctggatctgttattcagtttatctcatctagtttttcaaaatttagttcatttttttgtaatttgacgattatgaattgaattatacttgttatgcactgtattcaaattctgaatctgtttaactttgatagctcagttagtagagtacaatatattaaagaaaaaaaggttgttgagattttaatcacttgatgctgtcaaagagtttattaatctcataaacatgtacaaagacacagaatttggtgtatatacttgtcaatgtattttaagaaatggcaatattgttggaaggaaaagtttctaatttggctatgtaccacttaacaggtggaagatctgcttaagaactacgaga

SEQ ID NO: 14253 - DNA, 3673 bp, Aquilegia coerulea
  Intron number 2 from transcript AcoGoldSmith_v1.025762m (l ocus AcoGoldSmith_v1.025762m.g) derived from phytozome v7. 0 (chr-ID scaffold_70; pos 913771 to 917443)
aacacgacaaacacaaagcagcagagttgagacaggtttgattctacacttgtgtaactttagaatgctacttgaccatgttactattgtatttatgtgctatcagatgattgattaatttatggtctatacagttgatatatcatgatgcctagcactcttagatgtatcttgatgctcaaataaaaattgcataggtacttttacatataatttagggtatggtaataaactttatgtctggaaaacattactgaatacctttacatattcaatacggtgtcgcatactcgcattaatgtctatgtcttgaaaacctagaaataatgttcttttttattgaggatgagcctaagtaaatagtattttactataaggcaaacattttatcattattatctactatttggtgattaagttctagaattaaacaagaatattaactggtccatgcgatttccatctttccttaagtgctcgagtctcaataaaagtcctttgctttgcctcttcgttcataccctctcttttcttcctactataatattatactctcgtcttgccctcttacttctagatgattttttttctctgcgtttttgttttgctcttaaatggacaatcttcgtcattagggaacctcttgtgttttttttagtcaattctttcttgtttacataagaaaagatgtaaagaatgatagactttttcacttcttaacgtgttcgattatatagggatagtaatgttatcatacgtactgaattttgtttacctaatgaatcacccttatacataatcttgaaggatggtctacgtcatgtggtttaacaggagatgtattcatttcttggtagccttcttaaacgagaataatgagcttgggacatgttaatcatgcaagctcatctagtaaatcatgcagaaatgtattaaaaaggaagcttaagatcaattcctcattgatatttcattgaagggttttatttgtttgagccggcattacctaagttaacttagttattacaaaagtggcaggtagactattaagaatcattatatagtgtctactcactgtagtcttttaaatgctgttagtttagcatgacgctatgaggtgataactgataacaaactaacaaagtatataacgtggttttttataggcatttataatttaatatattgttaacgttgtcgctttctttttgactcttagttctgtctagaaacatcgttctttcatacctatcagacttgatgtattttaaaattcaggagtaacacttgctacgtaaagtttgtttacttgagtgttcacctctcatatttagcacatgtatggccagcttgataggttgatgtctttccagcccaaccaggcaaccattatgttgagctttgaagagaaaaaagatctgatttctagctccaacatgtgaaaggaaatggtgtttagaactatgttaggactttcagaataggcatgttgtttgattagagtccgtgttggcccggttcacgtataggatgtctagtatagcacaaatccaggagggagattgcatcctcacaaattttttatgcccatttcctctgtatatgagtatgaaaatatttacatgcaagttgttcagagtgggctcatatttgttttttttttttgagaggtaaacgagcataatatattcatatcaaaaagttgattacaaacaaagccaatggatgagatatccttggtcaaggaaacaaaaacaaaacacagaagaacaagcaacaaaaactataagaaactctacatcaagggccacttagggcatctctaatggttcatcaaatctatcatcaaattcaaatttgatgaaaaagtgaaaaaaactccatctaatggaccatcaaaagtttttcaaatttgatattttagcaaaaatcatcaaaagttcatcaaatttgatgaaattttgatgaaaagcttaaggtttgatactgggtgaggcgggcaagagaagaccgcttcacttaaagcggctaatgaagtgctgcttaaagtggcacttcaaagcccgctttaactaagtggcacttggacagccccattaactaagtgaagcgggtgttgggggcccgctttagtgaagcggtcatccattagccgctttagttgatgaaccattagatagagcacattttcaaagcaaaattttcatcaaactatcatcaaatgcaaacaacaaaaactataagaaactctacatcaagggccacttagaacattctcccaagagtaagcaaaagaaacataaggaatctctccataatcatgccatctcttgcaccaaagggatatgagtcttttgatgtcaaggatggtgcgatccacatcacgttgaactccctgaaaatgtcttcgattccgctcaaacataaatgtgggccccaagtaatggattcctttaaaataaattaattcagcttggtattaaagtaatctatatacattttgtgttcatcatgcaccatatcctccatttctcctaaatttaatgcaatagatcaagtattgcccatacctgatagattgaacatttgatgtaaaagtgcgctcatgtaattcatctgtcatataaatgagtgttataaattgctttcgattaatatcacaagtacatcccacttcaggttactcttttgctttggtgcttgtagatgggaacttttggaagtttgttgtcttgcttgtaagttgtaacgtactggaacctcattcctaactaaaaaaatcccatgcttccatattagaaagatatttttattttacacaatattcaaacttaagcatatgatccttttaatgaggtggagaaatgatagctttgtactgttaagtctatatgaatttagtactataaactttagtaacaaataaaaccctaagttttacaagtatttttgttatgaattgtgacttttttttcttaggccaatgacacctggatgctcaggtatcatttattccgttcacataattcataacattacaaataacatcaggtttaaaggactgccaacaaactctatattattgtactcaacatgcttccaaaaaatattttatgttaactaacttgaacattcacacacatattatctgtttaaaggcatcaaaccctaggtttctatagaatagcggcttacctgtagcctgtcctgcacgaccacttgctttttccgaacctccggtttctattctaaccaacataaagtcctgcaggtgtaataagaagtgtcagacatgggcgtttgtgccaagtggttgttattggttggtctatgcagtaacaattaatgcaagtggtgtctcattataactgtgaacaatgcattatgatcactactggttggcctacgtgatattgataaataaagtaatagttaaaaagtgatttgttagacttaaatatcctagtgttgtctcataatattgtatatactgatggctgtatttgaaatatattacaatgtttcagaatatactgcttctgttttgaatggttagtaattaaatgagagttattatgttttgatgcacggaatctgttcttttttttttcaatcattttattattattttggaaaaggttatagcggcaacagtggctagcgatcctgtaaa

SEQ ID NO: 14254 - DNA, 2479 bp, Aquilegia coerulea
  Intron number 2 from transcript AcoGoldSmith_v1.008788m (l ocus AcoGoldSmith_v1.008788m.g) derived from phytozome v7. 0 (chr-ID scaffold_45; pos 327237 to 329715)
agacaaacatatctacaaacagggagaaggagaaggtgagtggattgtgtgttgcttttagccacatgtttttataaccttattttcagtgaaatattttacatagttagagtgtgtgataggtgctaaattccggattttttttcctttattaataaactttcttgaaaatgttttctcactaatgaaagatttcacttgttgaaaaatctttgttcttggacctttcacaaaaatttagttcctaagtggaatgattcgttgatgattgcacaatttgattttgggcacattaaggtttcagctaaccccaacaaggaatgaactcctgatcaaaattagaatcaaacattaatgatgtcacgagtgtgaatgcccgatgacccggtgtggaccgtgtggtaatagtgctttgtgggattctttgtcacaaactgtctttgcatcatcagccatgattacgcatttcaaccaaccaacaaaaatataaaaggaaggatttacaatttcatagaaactggtagatccaataaaagaatggagaactgttcaaaattttatgtcatatactcatatcaaatactcggaagaacgattttcctacaaagttatttttttatctgtggggagaacccaatcagaggctcccctaaattaaaatgatttacaagtcgttgttaagaacagtcttatatcattgctgatataaccacgacttgacatattagaagatataattattgcccttttgaagatcctgattccgatctatactgctataccttttgatatttccctcttactatgtcttgggtcatcaaatatgatgtgtctgatttgtatcattctttttggattaattataatgatgatgtcaatactttcgactttggttatacttttattataacatgcttcaatttgaatcttcgtgaatctggatgtcataagtagaattcacttggtgacttagtgttactgttattatggttgtgcgactacactcaattgaagtcacatagcccttattctgtttctttagatatgggaaattgtgttacacaaaatttatgaatatcatgtgcatcacatgaataagtgtagaggactagaggggaaggcataagttgtaaggatttgaagtatagcttctcatacggatggttcgaagaatcttcacgttcttaatattaatcaagtagcacccctctcacaaagcaaacatgaatgttctcatttgcgtttgttccaaaattttagatctaatgaatgccaccataattcttttgatgattattttactcttgtcgctcgtgttagacggacaaagtgcaggacacactattattcctttctttagataataattattggataatctgtgaggtgacacctaagctgaattagttgaaactaataatcaacatatagtcccttaagttgttagtaaaacaaagcttggtgttataatcattttcaataatttcttagttgcaaaaatttaggcagagtttcagaaattttaggtatagtttttgatataaaacacctttgaagttcatgaaaaccaataatctaagtaaaattttctggtaaacttttacggacaaccaagcagggccttcgttagtgtcattgtttatcatagttagtttatacattagtgctgcctcccagatatggcatgtaaacaaagttaagtgaatgaaactgtctgttagcatcattgtttccaacagcaaattctattcaacatttgaattttacctttttgcaattcaattacttactagtaaatagcccatgaagttgctctcattaccttttggatgggcatctgatttaaggttattgggcagggttgatattttgttagtagtgtttatcattatggtccatcatctagccatcaatcattatatatatattatatttaattgattgttttgagaagcattgagcttaggctccagttatgtgtttgtctcttaatggtgagcctgttcagaaactttcttgattaggttgttgagatcacctcaggagttacttgatatttagaggttttaagacatctgtggttggcgctaagcttatatatgaaagctgtgaccttgtggctacctgaataggttcttgttttttagttgcgcctttttcagtatacttcagatttagaccgatgcactttaaatacaatcatgaaaagtttgattcttttgattcaagtaagtcaagtgagaagtctggtttttgtgtagttgattttttttttattttgaagttgatcaagagtgaacaacgcctttttaagttgatattatgatttatgagtagtgactaacttccctttgtaggttatacgtttacatcacaagtaattcttgccttgagtcatgagttaagatttatcttactaacttgattgtgtcatcgaaattcagctatttgtggcaaatcaggagaagtttcacgccga

SEQ ID NO: 14255 - DNA, 2046 bp, Aquilegia coerulea
  Intron number 2 from transcript AcoGoldSmith_v1.009082m (l ocus AcoGoldSmith_v1.009082m.g) derived from phytozome v7. 0 (chr-ID scaffold_11; pos 5187251 to 5189296 reverse stra nd)
ttccataactatgtaagttttatgttttgtgctatgtggattgttgtgttattttatctgaaaatctgaaactggtttaaagtttactgcgttgaataatgtatgttatgttaattttgtagaataagaaatgctttgagcaggtaattctctgttaagatatcttgttgctcattttgagtgcattgatattattgtatatgtttttcttgtagattatgtgatttgggtatagcataattctatatatttttctgttcatcgtgctttagttattggaaaattccttcctttggactattcaaatatgactagcgctgactagagcagtctttcatgtaatcttattgactagatgctcatagtaagtgtgttgcctctgtttcaaaatccgttttagtgatttgaggagaatatatctccgaagctgcttacttctgctaatatttaaatatctgctccatatttccaaaagtacatatttaattttcttaagtgattatttcgattagtggataaaatccatatgagggacaaaattgcagttgacaattattgtcaaataaagatcaaatgagcacccattttaacattcaaaatccacatctcctgctaaggggctgacctcttacctcccttcttcccaaataaaaagcaatcccatggacagcctgattgagtgctgaagacatcactgaggggcacggcaagtgaaatggaaatattcttacgaatagactttgatcctccaattaaaatgcaaagatatccacgtttaggtgtttgttagggcctttttttgtcagggcgatgcacatcggagcataaagaatatagtaccatgtacacaaaggatagtttttcttcctgaatgaaagagaaaactcacgataggaaaactatctcagttctgcataagtaaaacaaagcctacatatttcagattctactatgtacaaccctcagaggaacacgtgcctcgcctagaggtatttgctgagaagagttaacttctccgtgtttgtatttagttgagctttgcagcatgggaatagcaccttagtttgttatgatgttgtattgttgtcacatgcatattgaaatgataatgaagttgtaatgtatatttgatttgagtcttagactcctagtggtgttttagagtgtgaacaccctcaacgaagaccaattacaaaagattgtgatatctgtatgatcgatcaaggttatgttctaatcaatcaaatcaagcagaaatttcctgttgatcctgatgttaaattctttcgattccaaaatgatcataatttataacagattaaaatctcggagacaagacttgagagagctcccaaagatattccaacctaagttgcacagacacgtacacggcgacatgcaatttttgaaatagataggacacggacacattgagtacacatgtatatatctttatataattatatagagtattagtattcaaaagttcaagcaaattacaaagtctcgtagaattaactattccaaaagatcaattgctgtctttttctcacacattctaggcaccagttgagtcttggtttatgtagatctttttatgtattttaagttgctaccattttacttatttacatttacgaccttataaattttgcatatattattttgacctattttttttatagaaaatgacaaaaacacccctgtgtatgtccccaatgtgtccggaaaaaagaggacatggatttacatgtccaacacgtgctgggagcgtttgtgtccaacactaaaactctgtcctgttaaagcagctcccaatctgtgattagctctgcgaaacacgtactacgctgcatctcaggctattcccttaactaaaccaataaaatcccaaaggaaagtttgtggccattgtttgtaacagcgcctgtgctgttgctatcactttactaaaattatgcattgccatcctgcagagatttgcttttattctgttatgaatgttggtaagactgaagatcctgttctgtgtgaaacaggatataa

SEQ ID NO: 14256 - DNA, 760 bp, Aquilegia coerulea
  Intron number 1 from transcript AcoGoldSmith_v1.004493m (l ocus AcoGoldSmith_v1.004493m.g) derived from phytozome v7. 0 (chr-ID scaffold_9; pos 1354500 to 1355259)
actatcttactacttgctttgctcacactggagaggtcagttaccattaaccccacccaccacttcaattatattattttttcttgtttaattgcgtttttttagggtttcatgattttcttaaatttttattttttgtaaaggggttatggggtttatcctattagtagttatgttctttggaattctaaatcataaaaagaaaaaagaaaataaataaataaacagaatagtggattagaagtagagcatttttgagaaaaattaagaactgtttccctgttaaatatgtgtgagcattctcttattttggttcaatgacattgggtgagagttaagtgcattactaagccgaaacaatgtcttatccaaggggattcgaaatgcaaacagcaaactacatgcaaatcattttcaaagtcgactcactcatactacctattcaactaatgaactttgtgccatatagcaggactagtgtattaattgcccatcaagtctttagttaggacttaggataacgtctgggatacaggaggtttcatatatttccaagtttagtttttggtgataaatcttgtacatatgtcattgaaagcttgactttacattgttactcatcgcatgcgttatatgatcagaattgtttaatatgtattggtcttgtcatttcgttttgtttgtgactgatgaagtttagataaatgttttttgtttgaccctaggtactctccataaaaattattcgtaataagatcac

SEQ ID NO: 14257 - DNA, 2390 bp, Aquilegia coerulea
  Intron number 1 from transcript AcoGoldSmith_v1.011534m (l ocus AcoGoldSmith_v1.011534m.g) derived from phytozome v7. 0 (chr-ID scaffold_58; pos 917286 to 919675 reverse strand )
aggaaggacaagctcttgctaccagtgtttctaaggtcgatttcgcagcaatttagtttacttttattacttaaaatgtatcatctctttgtgaatatgttgattatgaattatatattgattggtttcgtgagtttggactaatgcataacatctaattagtaactagaataatttgtctgcgcatttatttgaattagcgagttctaatgtagctgtagattgaaagcagtcatttgttttattaattagctacgtcaatgttagagaatttctaaagtcgtggttacttgaactgcatgtgtaatatacttagtatctgcgatagtagtctcagagctctcaagccagctttagaaattaacacacacagtgatttgatttctttgatgaacataacatttgtagcttgttaattgtgattaaattgtgaatttgttgattataaataatattgattaattgattgattctgtgagtttggactagtacataacatctaattagtaactagtgtagtttgaatgcacatttatgtgatatagcaagctatgatatatatgtagagtgaaagcagtcatttggtttattaattaagctacgacaatgtgaatttctaaagtcgtggttacttgaactgcatgtgttatatagtatctacctcagagctctcacatcggctttagggattaacacacatagtgatttgatttctcatttctttgaagatcttaacacttgtatcttgttgattgtgattaaattgagagatgtatgctatcacttttatcttcaagtttaatgtatgaccagtgcagaagttcaattagggcatttattaattaatctacatcaatgtgaatttctaaagtcgtggttacttaaactgcatgtgtaatatagtatctaccatggtagtctcagagctctcacgtcagctttagggattaacacacgtagtgatttgatttctcatttctttgaagattttaacactcgtatcttgttgattgtgattaagttgagagatgtatgctatcacttttaccttcaagtttaatttacgactagtgcagaagttcaatttgggcatttataacatttaatttagatcccacacgagttaatagcactgtgtaatagactttactgattgatgatctcatcccaggtttcgtaattggatctcaatcctgaactttttcatctttttagcaagtttatgaataacatgagagaagataacaatccatgttattaaatttacacctcttccaaagagttctcacctttaattgatgttttcttctttcaaccgttgccaagataccgaaaaaagagcgtgtttttatatttattaatactcattactttatttgcttatatctcaaaattgtgccatgcacatcacaatgaatcacacttctttatggcatatgacatctacgccataatgaatgcaagtcagtaactataaagttttaggtttacttcccgttttactctcatgtgtttgttatcacatatcacctatctcatcatggaacctcattactaaccttagcatccttccatctcttcatagaagccatatgatagatacgcgtatcccgattatgtatgcatattgacctcttcctcttcaccatttaagtattgaacagaaccataagggtggatagcattagctatctcagttccaaaggtgatgtggagtgaatcactaagattcttgttgatttggttcgaggaaaataagcaactgccgctgtttggtgctcttagtagtagtatagatattgcttcattcagcttgtttattatctgtattggcatacctcagcaacagtctgtttactagctctttagaaagttttcaaaattccctggcgattggcattggaggtttagtgagaaaaggaatgcatcattacaataagttgttgactcaagaaattgcgtggtgggaggtttcgtgaggattctttcatgtggtgttaatgttgtgctccaaatgttggaaatgcccccagaaaatagactgcatccttaaatatatacatcattggatcacagtgaaagaagtattgctatcaaaatatcatctgggtagatatttgcatgtctaaatatatatagtacgacaaaatgcactaaagtggaattacacaactctagtaagtgacccaatatctatgttatgttatctttgtgaatcccctactttgcttgatttatgatgtctaatataggctttaactgttgtgcgtttattttttttcgattcagtcgaatcatatatctcaagcataattgtttgtcacatggcaaaacagttttcttacaaaatcctttattttcaatgcagagcctaccaggaaagctccgtt

SEQ ID NO: 14258 - DNA, 2191 bp, Aquilegia coerulea
  Intron number 10 from transcript AcoGoldSmith_v1.003218m ( locus AcoGoldSmith_v1.003218m.g) derived from phytozome v7 .0 (chr-ID scaffold_2; pos 1582422 to 1584612 reverse stra nd)
tcaacggcattggagacaggtaaattaatgtttttgaagtaccaatatcactgttatgtgtgttgttcatatatggctgactttgttaatgaccataaaacataattggtgctcaatctccatatcccatgatcctttcgaagttagtttggttggtctctagcagacttgtatattatgactcacttcttaactaccaaacatattaagcacagtacgaactgcacaaactacagtatgatccatcgctttttaatttagttggtactgactgaacttctctatgattcggttggtgactgctagacatattgagtatgacacatttctggctaactgaatcaaactccattcatacattcggaaaacattgcaccaaaaggaagaatttagcaccgacaacagaagaattatttttgatcaaataagttacaacctataatataccattttgaaacttacacaagatttgattaggttttgggcaagtatcaaaagttcattttctagtccatggtgtcttaaaactgacagaaagtaaaggtaaattttcttaaagatttttgtagggtttgtaaataatcttctttccatcgatctgtgatgtttggagggggaaagaaatgaaaagagagatcttctttttcgttccctggtgttttcaagtagagagaatggagaagatggaaacatcaacttaggtccttgcctcttgggtgattatataacccctatgattagttgactgagtattctaatgtagtatgctcttctaaagggtataaaagaaccacaccctatgttaaaacttaaaacaatagtttaactggcttagtaacacatcggtaggctggtcaatatagaaaacttaaataatgataatcataccagaacaaactttcttccaaagagatttaatataaatatcaaatgatatttgctcatgtagaatgaatcaggagcattcatcatagcagatgcctccacgaaacgacattgtctcgtgtatgcgttggataggcgccagggctcagtgtactacctacaccattagcctagagttcacgatcgtctagcacatgccccctgctacatttgagattctttttgcttgtaacatgttccattcagagaaaataaagttgatgctgatgtacgtggcctgaaattttctgtacgccaacaagcttggtgttaagaaattacctcttgcaggagggttggctagagatttattgtttaatacagaaaacatctacacactcgggatggatcggatgggacagtatagataagggaaataagtgagagtagaaacatgttttattaaaggtgtaggctttcagtgtaactgaaaaaacccttcactaaaacagatgaaaaagagaagtatggagcatgtgataagaaagtaagaaagaagtacggatatgtgaaatatgatcataacaataggcacttgaacttagagggctttcgtaggaaaagacaacaaagtgatgtcttatattctgtactttgtaggctacaatcctagtttttgattagtgaagatatcaacatgattttgtcatgtaaatccaaggcatctagcacaatagctccttactaaatgttaaatcattccaaactcctcgcaagaagtaacagggtcggtgcaaacacgaagaacaattcatatcatcatatgagaagcataagtaatatatgttcgtgtaaatgtgatggatcgaagttattaaggttctcatatattttacaataaatcccaaaaaattcttgctcagggaatgagaaattaaatcactttctatccatgtgggtgtttatctcttgccgtatattaagttacttcatataaaggatgggtattttcactattttgcgtagagagaaagtaaggtttgtattttttttttcctgatttttagtatatttcttttggtttttggttatcttttttcctgtttttttctattttggctacgtataactactgcttcatattaatacaacttctattttgccaaaataataataataaaggatgagtattactagagaagtttatggtttgagtcaatagtgtgtactattggtctaattattaaaaaggatatgatattaaacttggcgatttttgttttcttttaaagggaatctacgcaacctaaattacaagtggagagaa

SEQ ID NO: 14259 - DNA, 1127 bp, Aquilegia coerulea
  Intron number 2 from transcript AcoGoldSmith_v1.001887m (l ocus AcoGoldSmith_v1.001113m.g) derived from phytozome v7. 0 (chr-ID scaffold_2; pos 9943490 to 9944616)
gacgttgcaattgcagcagagatctgttggaaaaggtttgtaacattttctttttttggtgttggaatttctacatcatttttgtagatagtttctactttccagctatattggtaaacatacaaacttctgctattaatttttctgattacagatttccttgcataagaattaagatcttcacagtgcaaatatcgagaaaaacttcgctccagcagacactctcctaagtatctaccaacaatttctgacaaggatctatgcaaatctcgagaatattgtatgactatggttctcgagatttgctaagatgcttaatatgtacgatggatatgcacttaggagaacattttgctcctaagcgcaatggagcaaaggttttctcacaaatatcccataataataacgacactgccaagttgcaaataagaccccatttcataatgtaaaaatggattatgacaaattcatagaaggcttttccgcaattcaaagtacaacataagttaaaacagtagttacatgggaagggaaagttggaaaaaaacacaagtattgttggtaacataactaatgatgcaactgtacattaaatactcaatctgttaacgtgtgttctacaagtataacacctttttcttttatattcttctttctttatggggcgtagtgtgtgttaagattaagtagaacaaattcacttttgtttgttttgaagaataatcttgcaattgcataaggcacaccctacttatgccttcttcacatcaatgcatatgtaggaaaactagaaaggcaaacaggaaacatagtaaaaagatctggggaagaataaataatactcatcaagtcaattcaaaatgatgacttttctatttgacaacaaagtgaattgtacgagccttgaaaccattccagtcacataagaccttgtcagatagtgaattgtatgacatttggcttaagtattactgagaacaaatgtttgactgagttagtgtatgtgatgttctgtttcaaatatagcttcctagacaactctgtacttttatcaattctgtggtttcaaatattaatcctgacatgtttatgttctcgtttttgccccagatacagtcttaagggat

SEQ ID NO: 14260 - DNA, 2675 bp, Aquilegia coerulea
  Intron number 1 from transcript AcoGoldSmith_v1.010447m (l ocus AcoGoldSmith_v1.010445m.g) derived from phytozome v7. 0 (chr-ID scaffold_3; pos 4981989 to 4984663 reverse stran d)
ctcgaaagtgaattgaaaagaaggaaagtttaaaggtgagatttttaacttttgaattactttttttcgtcttcttgttttgaatttctaagaattgaaagttttaatcagtttaatgtttagtgtagaattgtgattttacatgcattttgattcaatttggactgatttgactccaaatctattgattttgactaaatagtattagtcaaggtttctcttttatttgttcttgtgagtttgtgatattgattgatctgggattgaagtgatttggttatataaattcaaaattgatttaatttagattaaatttctgattaatttcatgaaatgaatctggggggcaatagttgcgtaattgatagaactgaaatgatagtttgttggttcaaactgtaattgtattagagaaatctatgccttattgatttacgagataggggattgcagtcaaacattttgtatcgtgacatagacattaatttggatcttaaaaacagttcccttgtgatgaacgagctcgagacaagctaaaactggacaattttttttttaaaaggtctatagtttgtatatttctggccatagtttcacggttagattgtatggttattggggtaggtagcacagtagtaattacctgattacaatttacaattagtatgattctattctgtatgcaaaatcaagtacgtacttggttataagttattatgctgcaaagggggaagtttttagacatgaaagttggaattcataacgatcagaccattttttgctacaaatttgttaggaacttgacaacaatgtaagctggtgtgagcctctctctttaaaagtttcctatattcaatgattcctgcaccatctacatttgactgtcttaaccacctttatctgataaactaccaacttgaaaccttaaatctctatatatagttaatatatcatcattcctttggttgaactgtataatcttaaggactgaagtctagggctgtgcatggtctggttcgtgttggtttggggtttaaacttgaactgaacccaaattattagtcttatgaggacggaaaccaaaactgaaccaaggttgagatcaagcctgtgaactagttaagcgggttggtttgatctgtgataacaattttgggtcttactatttggttggtttatctttgggtttttggtcgttgtagtttcaaggggcttaaatcattaaagaaattacattaataatgatgtagttcttgcaataatttatttaactgataagtaatcccgcatgtgtagacataactgttagatcttgagcaaattttagtctagacctggtgagttttcacatttttcttagatactgtgagttgtcagactgaagagttcttcacacggaattgggagacaagtcagacgctttgtgcgtttgtttttattgtctgccatttttttttatcatttgggagaaaggtttcgcatgaagaaagttgtactttttctctgccctagcatggttgatgtccgagtatctgaactaatcagtggtgttatctgagaatcttttaggattgacaggtcgttggttttactctattattttccatgtttcttatctgaagaactactcagaggtgtctatcatgtcttctttgatagattaagaaccaatgtataatgcgtgtgcaaattgatcaacgtatcatgcacaccacctaggatagtaaactaaacatctagcatcaaatcttaaaactgtaccagatttatatgctttaacaattttgcgactccaaggggtataaagagtctcaactattcaagtcagagtataatataatgatgaagtttcaagcccttcaagaacaaatgtcttccccatcattgatcactctcaaagcgtttgttgaagttgtatgtgctaatgcacaagaacacttcttagtttttgtataaatatagtaacgtatagttttgaagaggcctggaattattgggaagcaagctaccagttttggaagtctgaatatttttagaggccctgaaataaacagttccaaaaacatgtaattgttcttttcggtgcctcaatggctatccaagcttcacccccaacccacccacacacacacaaacacacaagatttatcttaggtgtctttgtattggaagacaaaaatggaaataagttagccaatctttcattaattggtctgggagttattgggaagcaaaccacctgttttgtgagtctgaaaatatattctctaaaggctagcaaagttccccaacacacatgcacaggacttctcttcttgtgtctgtgtattgggagacaaatgaagataagcctagtttattatctagccaatcattgattgaattagtctggggtttattggtcataaatttagagtgtattgttgtatactagtcctgacataatttatataccagtgtggagcacatagtaacatgcatatttaaatgcttgtcttccaagatgttagttatttattgttacacatggcctgttcgcctgccttggtgtgggtagggtggttaaaagctatatcactatttgctgaacctgtgctttttaaaatgctctctctcacttgtggaattaatatattaaggtttatgcagatagatagccactgaagaaaaagaat

SEQ ID NO: 14261 - DNA, 1775 bp, Aquilegia coerulea
  Intron number 3 from transcript AcoGoldSmith_v1.015563m (l ocus AcoGoldSmith_v1.015563m.g) derived from phytozome v7. 0 (chr-ID scaffold_7; pos 576846 to 578620 reverse strand)
ttaatagagatcctaagttcactaactttgttgaggttagtttgatttattttattatcttatcgaatagctgctcttaatgattgggtgtaatgtggttattagtttgaacattctttaggttaagtagaaatgatataattgcgtgaacctaatagcttcaagtcttcatttgtgaaatgatttgtaattatttttgtccaagtatttaggtaacgacagatattagaggtttagtgagttttcatgtgaaagaaaggttttggatattgaaattttcatttcaagtggagagttggaggatacactaacaattctaggaattttctggaaattaatgttgactaaaatatcatagggtataaaaaatccagtattgtaagaatcctaatattaaagatgcattgatgcctgatgataagaataccaccatggaagtgcacaaagagaagaatgcaatgttggatggaactttagatgatctaaggaacttatgaataggaggaggttgagttagattgagacttctagaacaaagagaaaaaaaacaattgagagaacttttcgtcctctaatttcaaagtggtgccaaggaagcgaagctttagttagatgcccatttacaatatcgctagttggtaaggcttcattgattataacacctaaatagtattagcgtcatcaatccttatgagatcgtaaataaggcgattcttaaataaagtatgacataattcttcaggaacatcaactgttaggcatcacaaatggttcgctaaacatggtaccaaattcaaattctgtatggctaccatttaaacacgaaacaaactactaaaccaagagaaactttgatattctcttcatctcatgagctatgtaactatatttgatatctttgaaatctcttcaaataattttctcggtgcttcagccatattttgtccaaatttagattgaagcatcattctccgaaccctatcttgtttttcacggagagatcaagtctccacagtaaattttaccattaaaacagtagaaactattaactgtacccccactaagagtaaaaggctaacacaatatatatttttgatggtggcagaatggttaaacatcactcaacgacttagctccgatggataaattgaaaaaattgtgttgcctcagttgagctacgtgtttcaaattcctacgtctcatcgcttcctttaaattatgtaataaatattgaggtgaacacaatcaagtttgactttatatctacaacttgatagatcccttattgaaatatttcaaccctaatttcaatctagatagctatgttggccctagttgagctacatctttaacaaaatttacaaccttcctcataactatggctttgtctagaccatatatgaaaatcaaagtgaatacaatgaagttagattgatttatttatttctagtttgagatttccctcatttgaatacttcatcccaaaaaatcattggttcacactcaaagaatctatgggaagctgcatttacacctgcaggctgaacctttgctaaacaacaaaaaaatttaggaagcttttcaggattcagcctgcaacgagattaaattgataacaaattttccatggcttgtttggcataagcctttgctagttatatatacatgctgaactgatccattttatcatcttatgattacaatctttgagcagttttgctaatgatgggtatcactcttgcagtttcgcacacacaaggtcatctaccggcgat

SEQ ID NO: 14262 - DNA, 1774 bp, Aquilegia coerulea
  Intron number 1 from transcript AcoGoldSmith_v1.006177m (l ocus AcoGoldSmith_v1.006177m.g) derived from phytozome v7. 0 (chr-ID scaffold_64; pos 615556 to 617329 reverse strand )
cgtataggggcagacaagataaagagggtatatatagtattttttgttatgctattgcatcttcaattttttttgtttattaatccttaggtttttttttttttttttataactttatagagttatgatttgcagttttttttctcacccctcccccccactccaccaaacaatttttttccatgtcatgtcttgcaagtcatcaattttttcttcttgttcattttgcaaaaaaggcttgcatcctttttccacatctcatctttaatggcagttcctatttaacatgtgcacaccatactttttttaaaatgtgtcggatacacgaaaggatacacagactctcaaaacacatgttggagacacggggacacatgttggacacacgtaaagactgatgcatttgattttataaatactaaaatacgaagaatgggacatgggagaaaaaataaatagaaacaaagagaaagatgagtcttcatccaatcacaactaccttagtggaggacaacgtaccacatcatcggctaagatctgatattgtgtcggatgggcttcaggcccaaaatgaagagttatatcctgagatgagtcacggcaattgcagttgctcaaaattacttgagatcatttcgagcggacccaaacaatagaggcccagcacgtgttaggccacaagtatttcaactattgggcccaagggagaatatcggctcgatagaggttgtaaattgggcagaacaatcaatgactggtgatgaaagtgagtgggaatcgctgccatatactaatagtgagatgagggattcggttgcaaatgaaaatatgattgcagaggacagtgggtcggaacaagctgttttcgatgatattgagagcgcttcaagagttcaggagactcaagaagcagggttggaattgaattcttttttggctcgtcttgggaaagatatgggtatagaagtggagagaggtgcagtatctgcctttggatatcctcagagcttgtaataaccaaatccgcgaggaaatattggtgtctgtaagagtgaacaagaagaaaggccataacagtgtgtaaatggatcagaaagggcatactctgtttccaatctcttttaatcatgcatgttggaatatgattgggtgtatgctatatcaattggtaggtatggtgggcagatcttttgtagaaatagagagtgcaatttgatgaagtgcttcaagggcttaaccatttttcatggcacactgattaaattcatgttgcattatcggaacttctcacacttttaatgaattttttattttaacggggaaaaaaaaaaaatcacaataaaaaaaagataaaaagaaaggtgagaagaggagttgttatcttataatgtctaaaaattggagtataacttgatcatagtccgtgtcttcgtgtctaactggttttaggatgccgtgtcagacactttgtacccatgtcagacactgactgacacacgtaccgtgtgaatgtaactttgggcaattctctttctttgaaaatttatcattcttttgttgagcaatcacttcattacgcattaaaaaagtgaaactcaagatcgcatgtaatgtctcaaaaatgctctgttttcctgttaaagaaatcatttggtgttatttgaaaaagtaagaactaagaagtcatttggcttagtgattagtattaattactttgtgaatatctcacttttggttaggttgtacgccccttcattgggctgctataagaggt

SEQ ID NO: 14263 - DNA, 1169 bp, Aquilegia coerulea
  Intron number 1 from transcript AcoGoldSmith_v1.009061m (l ocus AcoGoldSmith_v1.009061m.g) derived from phytozome v7. 0 (chr-ID scaffold_17; pos 94343 to 95511)
catcagcactacccgccaccagtgtggctccggtaagatttcttaaacttctctgtttgtttgtgttggtgtttatttgttcgagggttttttcttcctgataatactttctttgatcgatatctctttaacatgctgcatagatatctacatagtatggattgatattgaagaaggtcagatgatgtttttaaattccactactgatataaataaaacttgcaaactaagcttaacacaaataaactatgaaactttcatctcccctgtcggctgttcgttgcaagaaattatgatgatagaaagccatcaccagagtccatcatagcttctttactttcttctgacacctagaaaatcaagaggtaaattggaagaggaatacacttcaaatcaattaagtgcagaacaaaacttttcgatttattaataagccatcgactagagtaagttatccagtaactgatggctcactagtattctatgactttgatgttgtgctcagcgaagccactgagtagtatataacctgctaccatactttcctttcttttccagctgtattagatatcatgttatagaaaacctgctgtggtggtgtgggggggaagggcctgttaacttgtattgcagaacccaactcacatattaatttcctgtcttctggtacccataaaatcaaactaatccctgtgccttgcatcagagctttcttcgtggttgttgtgcagtgttgttgtatctcttccacacaatttctatagcattctgattggtaaagcacaaatactattcccatataaacaaaagtaccttaaattcagagaaaaacaatatttacaagcaaatacttttgctttgagattttcatataatttgcattttctatggttttctcattatcacaactagaatgagtagttgctttagttcaaacatatatagtgcttctttgcttggttatgggccaagatacatcaagttgtattgaaattctgttatcatcctacatagctaggttagattggtactgagtactgacccaagtacatatattgttaccttctgtctaaatcataagatccatttatttttgaacttgaatgggaactaacatctatttttgtttgttgtgcaaccagtctgggaataggtcagggaatccagga

SEQ ID NO: 14264 - DNA, 1733 bp, Aquilegia coerulea
  Intron number 1 from transcript AcoGoldSmith_v1.004095m (l ocus AcoGoldSmith_v1.004095m.g) derived from phytozome v7. 0 (chr-ID scaffold_5; pos 2902990 to 2904722 reverse stran d)
gatcaattcgttaactttgtcattcgacctccaaggttagtagtataatgcatcatcatcatcaaattttctgtattctagctagtttaagcttaagaagaagatatttggtttatatttgtgttttttttatatcgtgttttgactatgaattaatggcgataatgtatagagagaaattatagtggtagctcaaaaacacccaaaatacatattatcgagagatgagagctgtaagtaagaaaatctaactagattggcacacataaatcattttccatcccagcatttacgattacatgccctttacatgcatcagatcagagtagacttcttcatttcaaaataatgggatcctaatctagtaactttattttgtatggctttacaatgatgttattagagatggaaaatgtgtcaccatgtatcgacacaataaaaactaactaggtttggcacccccttagctgagtttggccatcctacctttatatgcaagtttggaaagatgtacttaggtagcatgcagccatgcaccacaataaattccatctctgcatgataatattagaatctaatctaatacaaaatttgtaatattattactggattttgttagttgtgcaacatagtctagtaaccacacctagttactttcttagcgagtcttctttgactcgatggacattatgaatagaaatcatccgagtttagattatctgtgaaagactgaaagtatctcctcccgccatgagtacaacctacaactttaaaacttactttgaattttcgaggctggcactatccatgccattgcaaattagcgaccggcctgtagttaacttttctcatatcttcatctggatgacaatattcatccattgatatgaataaaaagacaatggagaggattatcacaatgtatttttacttcacgaaaatagatatatattccaaatagttaatgaaaaaatatatgaaaaccaaggactttggggggaccctaaacataagacatttcattctcaaaattgatattcagtaacagctccacaactgatttgctcattgacttcaagcccttatttacatctaaaatttttcttgggtgccaagaacccaccactcacataaattgatttaatcatggaccaaaagtaatcaaaactaaatgaaatttaaaacggacacaatggacgcatatggttgtgatgcctaggctttgcaagatagcgggatgatatcatccaggatcatgtcagagtattaatcagagcaatgcctgtgctacaatgcataacataatatttctgacttctaagccatgaggacttaaaatccatttcacaacactctacaattgaggccagttgtctcccatttgaaagcaatttatgttctatacctcaattaggaggcaagtctctaccttagggcctcagactaaatttatttttataactaaagccatggggaaattcatttcttgatggttgggaattattatgcaatcagaaacatgtaattgttcattcaggtatttaggggaaagtttgcctcacattagactatttgtgcagcctccgcatgccttctaacatatgctagctttcctaagattgaacatcattttttgaagtgattatagctttcttactcatatatttatattccgcaaaatcaaatatctttatgcagggcagaatataatcctgaccagtacttgtgggaag

SEQ ID NO: 14265 - DNA, 2286 bp, Aquilegia coerulea
  Intron number 3 from transcript AcoGoldSmith_v1.005491m (l ocus AcoGoldSmith_v1.005491m.g) derived from phytozome v7. 0 (chr-ID scaffold_95; pos 568766 to 571051 reverse strand )
gaaaggtaagctacaaaacctttttgttttttctgattcagacttcagagtggttttagttcattgtcacacgtttattggtataatttataagaattttgagaattttgagaggtaagaggttaatatattaagtaacatacaagagtatgaggtacgtgaattcccgaaacaactaaaataatacaacaaactccctactacagaaaacacctcaacaacaaaactaaactcctaatatacagtgtcccaatagataactaaggctgcaaatggaacaattctaaagtcgtcccatctcttgcgccattggaacacgagtcctttgatgtcaagaatagtatgtatctcgtcattgaaatagcctccagttctgttctagccaaataccatagaggatcacaaagggaataatatccacaagcaatgatgtagaaatcgtaaaaaaagagatttaaatcgcgatttaaaacgaatcggtcatatatcgactcaaatcgctgacaaaatcgcatctaatacaaatcgtaaaaaaacgcatacgattttatgattaatcgtgaatcgtgatttaatacttgaatcgttcgattcatatatcttgtttccaaagcttttgttttcttcttcaatttagttgtttttttaattcaaaagaggaacaaagaattgaagagaagaaaaaggtaaaacaagaagaagaagaaagagagagaagaagaccaggagagaagaaaaccagatctgttttcacgaattgggtgaagaagaagagaccatcgcaaatatggtaacttcagttggggcgggtcaaaaaaaaggtttcgcaaatatggtaacttcagttggggctagtaaaaaaaaaaggtttaatgatcactttgggtccaaattcgtgtgaaagcccaatagagtttaaacaaaagatctaataaactggttttaattattatttgagatccagaccttctataaaaggtttcaacacagagaatagttagattctctttgcctcttcttcttcttcaatgcaagccaccactccaccctcttcaaggttgtccaccaactaaagatctctttttttcacttgtttcaagtgttttttcactcctctagtgttccattgaaaaaggaaccacctttatttatttctaccaaataaagtaggcattttcacttctctttgtcttctactaaggtccaaagtataaaaaaactcttctttactgtcatctacaatgtctacaaaaacaaagaatgattgtacttggaagtgaaaatgatagaaatgattttgggcactgtttgtgtcaaacacattcactgaatgatggaaatgatcaaaatgaatatgtaaatggaagtctaacacatttataatgaaatctatatacttttgggaagacagtttagcacatcttgtatgtaagatatatttaaatatatttatataatattataaaaaaaaacttacgatctacgatacgatttacgatacattttaactcttaactttttcgatttacgattcgttttacgattctacaacattgtccacaagtatcttcttagcgtgactgcatgagaggccgaccctaactttccatattaaaaagagatcaccaaccgattcaggagctaatcagccctaccgacttaataatattcccccaaacaacaaaagaaaactgatagtgtagcaggacatagttaaccaactcaccaaactcgatacacagagggggaaagttaatgatgatcttcccaccccctacagaagtacagaggttatctattgtgaggatcttcctaagagaggcacttcaactgaaaaaggccaccctgtgaggaattttagccctccaacaatatttcctatcaaattattaagacaacacaaatcatcatactattatggttcaattttaccttttgtgctacttcaagatcaaattaaggagattacaaaccgactcaggatgcccaaactaatatagctgagcaaagaaatttacacaaaattgaggattacattgtgaactggagtagttttgtgactttgtcttttatcagagaaatttcattattattattattattattttatttctatgttttatttttgtcatatataggagatcaagcttaattcttgtacatccttactacatgctggcctcctcattttatttttttccgtatataggacctgtgagcgtattaatgtttatcatgcttatctttgcagggtccaggaccacaagcacgtatagtttacataga

SEQ ID NO: 14266 - DNA, 617 bp, Aquilegia coerulea
  Intron number 2 from transcript AcoGoldSmith_v1.005615m (l ocus AcoGoldSmith_v1.005615m.g) derived from phytozome v7. 0 (chr-ID scaffold_34; pos 1614828 to 1615444 reverse stra nd)
gcttttgcttgtgctctgtgtaagtttatttctatgtttatattctctgtagttccaaatatcatgtagggaattggtgtttgatctacagatttataaattatcaaccgcttaatatcttcaagatttctagtgtacataacatgatgtatcttacaggtatgacattttcttcttgttaattcagtgcttatgattctaatgtttagtatacgcattgagtcctaatgaaggaagttaaaattaaaaatcaacttaatctttggattgctaggaaatttaatattggattaggctattgttatgataaatacttggactaaatcgacacttcagtacacgtaagcaagggaattttaatacagctagacagactgttcccgtatagtaccttcgaagcagtgaatgtagaatgattttgttacttgttggtctttagacttcatttgtaatcccccaactgaaagaaagatagaagtaaaaagatggaagctaaatcttctgattttttttcccttttttttatgtgtttatgctgctgtttttgttcgctgctagctagagttttataatttcagtcagtgtcttaataatttattgctatgtctgcagcaagc

SEQ ID NO: 14267 - DNA, 1514 bp, Aquilegia coerulea
  Intron number 1 from transcript AcoGoldSmith_v1.001473m (l ocus AcoGoldSmith_v1.001473m.g) derived from phytozome v7. 0 (chr-ID scaffold_57; pos 202133 to 203646 reverse strand )
tgatactgctgtttactttgtcttcttgtcaacaggttagttggtttgtttttttttttttttaaacatttttatatcatttttgtagttattttgaagctgtaaaagatataaacatgggttttttattgtttaatttttgttggtatgttggattttttaacatttttatgtttgtctatatgtgagagtggaattttttagtttttttggaaattagagagaatagatttgttgattttgacatttttttttttttggggaatttgtttgttaaatttccatttttgatagatttgttgaaaaagagagaatatggtgtttgagaaatgaacaaatttggttttcaaatttgtagtgaatgtagtatttggggcttttgtatttttgggattgtgcgataattggaagtgtgactgtggagtgccctttagagggcattgaagatttgagtataggactataaacagcttaacatatacactttctaaaataaggaagaaaaagatgaagaaagggtgtttgaacattttccaatataccatgacactcagaatatcacacagatctggccaaacaatccagttagcacaactttttcagatccagattttaagaatccatactccataggctcttagctcttttgctgcacagcctgcactaaaattttttttttttcatttttttttttcatttttggtagatatgtcgaaaactagggaacattagtgatgagaagtgaagaaatttggttttccaaaatatgtagtgaatgtagtatttggggcttttgtagctttgggattgttcaataattgtaagcgtggagtgccctggctggaggcctttaaactgcaaaacgtatacacattctaaaataaggaagaagaagatggaggaagggtgttcgaacattttccttggatcccaaggaggtgaggtggatgaagaaaggagtgcagcacgacacacacaacttcgtaagatttggccaaacaatcaagttagcacaaccttttcagatgtctgattcttataatccatactccagacgctctttcgctgcacagtctgcacttttttttctgaaaaatgttctgttacgtgtagagaacttcttaggttgttgtacactttgtcaaaaagagagtcttggacgtacccaagtggttatattatttatgaagtgtcattttgagtatgagtttgcccttattataatgaaagttatattatagtattatacattacaaaagcttttcaaatgaaaattctgaacagagatgaccattatcttgttacattgtagattttgtgtggtttaagtttttatttattggtacggaactcatttgccaattctgatgctaagctatttcgctgctattatggtttcacccaatggatggaatcttgtgatagcaaagtccagacccttttccttgatgctaattactttacatttcattgtttcagttttggggatattggtttcatctggtacactttta

SEQ ID NO: 14268 - DNA, 306 bp, Aquilegia coerulea
  Intron number 3 from transcript AcoGoldSmith_v1.006801m (l ocus AcoGoldSmith_v1.006801m.g) derived from phytozome v7. 0 (chr-ID scaffold_39; pos 340239 to 340544)
atcatcagcaaggtattaacttatggcattcttcgggttctaattttggaatgttttgcttactttagatggagtgatatcatgacatttcgcgttaatgtttcctggaactggtgagtgtattatggcaagatatagtatgagtatatgtcctgcatcttgggagaagtctttcgttcaaattataaaatcatgctcgtttattaattatacattactcattaaaaaaattcatatttgtattatttttgtaaacaaaatgtcttagtagtcttcacaaatgccgttttttatgattccagaata

SEQ ID NO: 14269 - DNA, 1438 bp, Aquilegia coerulea
  Intron number 2 from transcript AcoGoldSmith_v1.007304m (l ocus AcoGoldSmith_v1.007304m.g) derived from phytozome v7. 0 (chr-ID scaffold_9; pos 4167719 to 4169156 reverse stran d)
tctcagcgtcttctggtaattttttttataattttttttttttatgttatgatatgttttttcttgatttcttatgttatacttgtatgagtactgaagagcaatctagttgaaatttcatggtttttaatgttttgcaaataatgttgctcgaactatggccaatttaaattttcaattgtcagctatagtgttatctccctaatttcatcacaattgcttgtttgctttgtgaacggaacctcttcctttggtatcgtttgtttttttctagaattaagcactgaatactcattaagttctgaagaacacttaatacattcagtcattaagtgatccattctgccaaattttaagtccgaatgacttaactgaatttttagctgatgaaatagattaagtacttaatggttagtagaaaacaaacagtctgaagactgaagtggtccacccacttaagttcagtcattcagactgctgaatgaaaaacaaacgacaccttaggattttattattatcatactgtacagctgtacaagtacaaagtctttttaacctgtggtcaactatgttcacaatttatgatttaatatggtgatgaagtttagattaatcaggaacagatcctgtgcagaagtgattatcagaagttctaggggaacatgacattcttggatgtaattggctgatgagactgagagagtttgaactaatgtgaatgtactttgttataagaattgatgttattcattctgtatgagtgataatcttgttgtatgttacttctctaagtgaataagtgtaatttattctgatagctacatggtcttagactctgatggatatccatcttcatttgttgattcagtgaagtgttattcacttcaaacccttgaaataaatacacagagtgttgaatttacttattgaactatactgcataggcatatggttctaaactctttgatggatgttgagtttaatcgcctgtctaccttttttcatttgttttcttgtttttacaaggttttttggtatgttttatcactttgatgtcttttttgggtactcttttatacattagtttctggtcattttacttgtctaattgccatagaagtgtagaaccttgtccaatgtgaaacaatataagatgccatagcccataggatgagccataggtgtcccaaataacttatgacacgtagattccttgataatgtggtgtctctgtagtccaaagactcgtagatgtttttgcaataatgttttttaaccaatataaagtttcttggttcatttgtactcgtagatgtttcttcatataaaaaaaaaaaaaaaaaaaaaaaattgttctcaacatacccggttattgacactttgaacttttcaaaatagtgcagattgggaagctgttgctgaccgtggttcaattcaa

SEQ ID NO: 14270 - DNA, 1349 bp, Aquilegia coerulea
  Intron number 5 from transcript AcoGoldSmith_v1.000140m (l ocus AcoGoldSmith_v1.000140m.g) derived from phytozome v7. 0 (chr-ID scaffold_53; pos 1354083 to 1355431)
cagaagagcttttaattagcgattctgtcataaaagtatgtaattctcaacccaatttctcttagttttggtcttttgtttcaggcaaatagggtctgtagtttctatttgaactaagtttgaggaattacttcgatgtacctatattataataattttgatcatatgctgtttgttcaaccaccatccatcttggttaaaaagtcgttatctagttgcatttagcatgtttcgattaagttacttcataatagggaacggagtcgacggagtttggattaagttacttcatctgggctcttgtattggatagggatccactactgataatttaaaatataggatatagtcatgccaaacagattcataaatgtgggggcaattacgaagaaactaatcagcacatattttggaagcatttaaggagctctcaagtagtgggaaatttatgacatattgtcttcttaggcaaacattgtatctacttaaaagtttggtcctgtgcaaatcattttgcattgaccattttgttgttcgtctcttttcatgttatatagagtagccggctagagagtcattagagttcctttttcatgttgtatcaagtatccgaaaagcagattttgtgtaatgctaaaggcctaaagctaccatatgtagttgggtattttactcaccctctttatgtcccctcggctttttatgatcttatggtgagataggaagattcaatcttgctgtgacgttttattgttatattgggctgtagtttgactcatctctcgtacaattttctgtaataaagtcatcgttttatctataaaaaaagcagtccaggttgatgattaagaagccctataattagatttagatgtgggcgtttttcacatctaaaacgaatatctattgaattgttcgatattaacaatgacacccacaagatgtccagtttactcatccaattctaagttttgagtcaattataaatggtttcctttgcttttcttaatgctactcttttcttggattttttgtttgactggatatataaatgcaaagaaaatatatttatgtcatcatatactaataaaaagaatcattcttgttatttctccactactgttgctgataacatcattaaagattagtatatatttaacatgacaagtaaagtatattgcaactctatctcaatgagatatttctttcattctgtttttagtttctcaatcttccaagatgatataatcgtggtgatgtaatttatcaaatcatgtgagattttagcgaaacaacattgtttcatgggtgatataaactctaaagactacttttatgcatgaaggtgt

SEQ ID NO: 14271 - DNA, 491 bp, Aquilegia coerulea
  Intron number 1 from transcript AcoGoldSmith_v1.009878m (l ocus AcoGoldSmith_v1.007980m.g) derived from phytozome v7. 0 (chr-ID scaffold_17; pos 1257263 to 1257753 reverse stra nd)
atacttctccaagggtcaaggcatcttgtttggtactcatttttttttttttgaaatattttattgttttacttgaatttatcaattttggtgtttttttgtatttagcttgaaattgggtagatgaaatttcctatttctgttttgtatttacgaattttagcttgattctattaatttgggcatgtttgtttttggactgaaatgaggtcaaacattcaccgatattgttaattttagctatacttgattaggcagaatccgtataattgaatggaattttgaatgcgagtacaaggtaggatgatccattgtacagtttttttttttttttttttaatttgtcttacttgtcaatctgagtatgggtttggcttttaattagggcaatttgttctactgtatgttgtcgatcttgtatactattttacatgaaatttgttgatctggatttatgtgtttctggctaggataggaagaacgaggaggtt

SEQ ID NO: 14272 - DNA, 1296 bp, Aquilegia coerulea
  Intron number 6 from transcript AcoGoldSmith_v1.000917m (l ocus AcoGoldSmith_v1.000917m.g) derived from phytozome v7. 0 (chr-ID scaffold_17; pos 1419254 to 1420549)
cttgtctgccttggggaggggccgaattaattgaggtaaagctttattaaagcatggcagatttggttgtaccatattattttagtctgaacgaagttttattcatccaagggttatcatgtatttgttatgactcttcttgttgttcctttgtatcttccacataagtggttgaagaacttgagattttcctaggataaacttttatgctgagatctgacaatgactcaaaacaccttgtccgcaagacctattatggaaaatttgaggattgctaaatgttgtttaatgttgaggatggctagaacaaaatctttcaaacacgattccctttgtgaggaaagacaacatcaccaaaaccaggttccattttagctaacaaaacacattcgaaatatgagttcatgaacatacatccatttaaagacatcaaaataaactctctgtactcaaatatttaaatataagttattgcttgtgtttacaacatgctcattattttgtgatattgcctatcttactacttcttaatgcggcttggccaacttggaacagtaagttttgtcacccatacatggtcattttttcaatatattccacttttagccctacactttcaacaaaattctaggttatatgaaagaaacttttgttttaactgaaggctatatcagtcatttggtaaaaagcaagtcaaagctgtcagcgctgcaataatgctagctgtcctcacagtttcatgaattaactcaaaaacagttttgctaaaaataataaaaaaacttaatatttggtcccacctactaaaaaacctgagcattgtctatgggtctacagtctacctctgcacgtgtaaatttttccattaaacatcagatgtgcccacctctaggcttaaaatatgttgtgtttttcagatttttgaggcccattatttcagcccacacatgctcaagatccaactttcaaaattaaaatcccagaaaatctatgatatctattcttatttttttgtaaaataaaaaaatacttatatcagctctattaatattttactaaataaaaattaaattttaataaatatatattaatcatattcttccaataaaatagcacaatcacgtattcacatgacacctttgataccatcattcttttttttttaatattttctttttgtaatatgttctgaacgtgcattccactcgtatcattaatgtgtgattagtagagttttttgttccatgacaaatatttatgctcttgcagcaagtccctgaggaaattgagagagtt

SEQ ID NO: 14273 - DNA, 1897 bp, Aquilegia coerulea
  Intron number 1 from transcript AcoGoldSmith_v1.002781m (l ocus AcoGoldSmith_v1.002781m.g) derived from phytozome v7. 0 (chr-ID scaffold_32; pos 404821 to 406717 reverse strand )
ctgctcaagctcaagttaaggtattattttatatcaattcattcattgcttttatgtgtttgttaatttccaatccccttttacaaatttgagggtttgttttaagtagatataacagtagctaacttttactatttccttgctttattaattttagtagaaacaatcaatgggctcaatatagctactactaaactaattcagtgtattaaaacacccacattgtctatttctattaacccgtcattattggtttgtttcaattctagggatttgaggcttgtcataatgtcataacaagtttgtatttgctttgtttgggcactgaaacttccccttataacaatcagtgatctaaatttacaaaattaattatcttctaatttctgtacattttttatatgtgtgtcacatggtacctgaatttatttggtttcgccactgaaactgtccctgattagaatcagtgatctaaatttacagatatacttatcttgtaatttctccacacttttatatgtgtgtctcatcacacatggtacctgaatttgagtttaagggtacaatgtagagatcttaatttgggcgagattcataattgcagaataaagtaagaagagatcttaatactccgtcaaatctctctcacactttatgtcttcttctccgattttaaaattttacctccatcttgtgtcctccattttcacccgtgaactaatttactgcccaaatcaaacagacccttattgatcttttcatttaacatagtacgcactaggccgtttgacttgctcgtaaactcttcatttggtccacatagaccttagttagtataaataatattcttagatgttttatgaaaagaaaaaaccattgatcttaatatattagagaagaatataaattcccgtttttagttgacacctttcttgttaattgaccataactttctgtagaatctcggagtaacatgaaacatccataattagaattcttaatttcatgtcaacccgaggtctcaacagaagttatggtcgatttgctagaagagtgtcaaccgaaaacgggaattcatcttcttctctacaatattaaaatcaatcttctcataaaacatctaatgattttatttatactaactaaggtctatgtggacctaagcttgaatttaagagcaagtccaaaggcctaatgctaagctcgcatacaaatctaaattatctacttgatggaatcctaattagaattcaatttctctaaatcaggaaatctacacatggcattataatacaactcatttctaatgactaggaaattgaaattcaggttattacatcaagtataagagaagcacttgcgttggaaagtatttctttaagaacagaagattttatgagaacattctatttacgtcattgtcagtggtatcatatcatttcgacctgtagtggtggttgctcaaagacagctatagtctatgtaccatgtacacactatatttttacaaatacatgttggatacatggaaatgcaagatgtgttggacacacaaactgatgcatttgatttcgggttggtgtttctttcataactctaaataaagaaaagtgaagaagaaatgtttttctctgttgctaaaccatggatcccaaataattcacaatctgtgacccccttatccaagttgttttgggatgctgtgttagacactggcacacgtacacatctcaatgttacctaggttataactgacagtgaaaactatgccagtactgcagttgatgagctcagtttatgttctttttcttttgtttcttttttttatcgtgcccccttttttgcgattgaattttggtcatcacatgaactttaatttttcattcaggccgatcag

SEQ ID NO: 14274 - DNA, 694 bp, Aquilegia coerulea
  Intron number 7 from transcript AcoGoldSmith_v1.000842m (l ocus AcoGoldSmith_v1.000842m.g) derived from phytozome v7. 0 (chr-ID scaffold_7; pos 3954230 to 3954923 reverse stran d)
caatcaaccatcatcaaccaacagccattgcttcagtaagtttttctattttcatataattctattgaatttcatttcactttcattgatcattggatattgagtgtaatagctgagttgtcatgaagaagagtgagcacttatgaatcgtccaataggcatatggaaaagtgtccaatgaggatatggaagatcttttcagtagacttatgagtgagatttcgaaattaatatttctttcaagatcatattccaagtattacaattcgttttgtctcacaatttttggaaacctttgatagtactaactactaagtacttaaaaggataactactaaatagtaaatacaaactcagtccccctctagtcacgcatacagggaaacacatctaccatctagttagtgcctttgaaatagtaaaacttaaacaaattcgagttgcactttgttatgtttattcttcgtagtctatctatatctacaaactataaagcatgtaattaataatctcaattaatatctattatttcaataatatgattttcacattaacaatagtttctgactactctttctttacataattttcttgtaaaatagcacgctctattagactcgtattcttaatattttttcctgtcccaatacatgttataggcccttgaagttggagctatctccagaagaagaaa

SEQ ID NO: 14275 - DNA, 1326 bp, Aquilegia coerulea
  Intron number 29 from transcript AcoGoldSmith_v1.013259m ( locus AcoGoldSmith_v1.013259m.g) derived from phytozome v7 .0 (chr-ID scaffold_15; pos 3283177 to 3284502)
gagagtttagctcaagggtttccaacacattgaaggtatttgcttttcttaaagaactttttcttaatacaattctgcttatataaatttgtggtagtttcagtctgactgactgagactgatgtgaatctgtagtgcgaaaaaagggaaaaaaatggttaaacaaaataggaaaccacaggaaaattgatggtaaaggttacttgataattgatatgtaaagtcggaaacctacaccaagaaatctgtagttggaaactcaatgataaatccctaaatacaaacggacacatcattttttcttaaaaatctgcgttgaatacatgaaaacacgacacatggggacacactgacaaactgatccatatgattgtggatttaagtttcttttgaaccccaaaatatgaaaaaaaaaaaaaaagaaaagaaaaaatcttcaatacttgtaaattgtgcatcaacaaggagtcatactactttgctattaataaatatagaagcctatgtgacaactgccaaaggtttagacatgattacaaaaattgtaagagatgctatgaattccgaatatattaatcaaattgtgtttgcatagtctgacagctctttaaaatgtggagttattgttgcatagtggtatataagtaaattggaatcccacgtaaacatattgactcgataaccaaaacaacagaaatattatttcccatcttaaatttgcatagtcctaaaaatggggagtcattgtcacatagttggaaacaagcaaattgacattccacgtggataagaaggtcactttaaccctggtggcctggttggttattaaagtacccatgaaacgtattccaatttgtgtatcacctgagacccagggaaccacattaaaaaacttgtaataaatgagtaacaatatatattgcattgcttgaggtagaagcatggacaactttcaggacacacaaagctcaaaatgttatacactaatgacaatgaaaaaatatcccaaaaatatcatatcccgtgcacttcttttatatacaaagataattgaagatctgtggttagtttcaataaaactttcgcgtatactctttctaagcggtatatggctacctaggcgaggtggggttggggaaagcatggatgaattacttttatagttgttctgtataactgcgtaaacatttaagtgagtgaaaattatatgatgttgatctatgtcatacatcgtcgattgttcaagattttctgtgaaaccggattaaagttttgtttgaattgcggttgtttacattggtccacaaatttacatatctgatgcag

SEQ ID NO: 14276 - DNA, 2597 bp, Aquilegia coerulea
  Intron number 5 from transcript AcoGoldSmith_v1.016538m (l ocus AcoGoldSmith_v1.016538m.g) derived from phytozome v7. 0 (chr-ID scaffold_58; pos 497983 to 500579)
cgggtatcatatttctcttctacccaaaatattctgattttatattatgtctttctctctctcagtccaggtccctcacagtctattcatagaatatcattggactgcactagagcctgtaataagttccctgattagcgcactttgaaccttggataatattcaaaagctgctcgtcagacattaacgttccttggaaggcaattcaaaatactaaaatttgtctggttgaaactcttaaatgttgtttgtagtaaaatagtaaaattataaagttatgaaacaacactgttaacttcggttgataaacatattgtgtccaggaaattatctgcatgattgtaactttaaacgtcatttacatgtaccttttatttttggatactagacttcaattactggtccttattaatgtttcaatgaccattaaatgattaagatttcagttatgatgctaattaatgcttttaaactcatgtttgtgcttcttgaatagtttgacactgatggactcacttcgtaaagggcgccaaagttttctgaacgcgataatgacatccaaacttcaacctgcatctagggcggttctgcaaatgatccattctccctgcaagtatatagcgtccaaagctagatacattctatctgaactatcaacaccaaatgtggatgtctatcttgattatgttcttagtactagcatcgaagttggaaatgtagggaataaagatcaaaccatcattgacttgataattttttcatgtctgtccactttgccgaagtatcgtaatacaattatccaaagagatggcataatgcatctgtcaacctttataatgtggtgccttagaaataatgctggcggtggcccttgtatgcagtctacatttaaatcttgtaggtgttgtatgcctgacatggacaactgggaaggtgatgatactcttttgttttttagcctgtggggtctagctgagctgatgcaagtacaacactctagactggggagaaatcatggtgagctaatctttaatcaagatttgagtggcttggaatttggaggttccgatgttcagactcttattggtaaattacaagaaatatcgggtagcacctctactagtcctggtcttagatggtgtgccacatatattcttagttattttggcttttatgggtttccaagcagatttggcgaaagaattgggaaagcatttcatacaaaggaacttgctgatatccatcttaaactttctagtggggaatgtttgagagttcatggcgttattgttatggttagatgtccatcattgattccgtctagagaatcgccttccaatgaaagactgtctgacgagtcatccatgggacaaagcgttgagcagcaaggcagaattcttcggagagaagtttgtttatctgcccgtgttgatgataaaacactgatgaaattgttgaaatttgtgtatatggggtttgtacaagtggatgatgaccttgtgaggcagcttaaaatgctctctagaggctgtggcttccattctctgacacagctgctcagtaaaaagcgtccaaaatggggcactaaagtcccctgccttgaattctcacctgctcttggaccctctggacagcgtttctcgtaagtttctcaacttgtacatagcattggatcaacttcttttttctttctttcgtcatgcagtctgaaacagaaaccttatagtagtagtttactaaatttctcttaaaggttgaaatgcatgtgagtaatctatgtaatctgttacactttactcccacgtagatgtggccagtccattaaatggaccacttgttgatcagctttatagaggattgaccctattgattccaaaactgagagggtccagattgtctatgttactccttgagcaaatattactacacgcccccttagttaaccatgaacagtccgaagctatgtaacatgaatgcacaatataaattgtgtcggatacagacactcgacacacatgttgggcacacatacaaactgatctgcatactatttcgggttataatttgttgtaaagcactaaaatgtggtaaaaaggtataggtgagaaaaaagtaaagagaaataacaagagcgattagcaaatatttatcactttatatacaactagaaaaagataaaaaagaaacgtaaaatgttttcttccattctaaaacatagattataaatacatcacaatctgtgaccctatgtcaaactagttttaaggtgccgcgtcagagacttcatatctgtgtcggacgccaacatgcgtacccgtgtcaatgttactcaggtctgaaggcatgggtcatcagttgataaaagtgatggatctgatgataagatcatctggaaccctgtccagaatatgttactgatgcattgtagaatatgagccaccaattgtagtgggacagaaataccctcttgccaaaatggtctcttcttctaacagatgagtgctttatggcgaagcgactttgttgtactgagcaaaatgatgaatttaaatcccttttgtttgactgcagtgacattatcttgcaagctaaagcag

SEQ ID NO: 14277 - DNA, 291 bp, Aquilegia coerulea
  Intron number 10 from transcript AcoGoldSmith_v1.004604m ( locus AcoGoldSmith_v1.004604m.g) derived from phytozome v7 .0 (chr-ID scaffold_24; pos 1408192 to 1408482 reverse str and)
gggttcattttggacttttctggttagtaacaatttccttatcatcaagcattctatttcaatttgattttctttgattcttctgaaatgaaaatatacgagtgtcttatggacaatgaataatggatgtttataacagaaaatattgcaatcagatattgtgggacgatttatttacttttactttacatgctgattatgaaattaacatattagtagttgtagtttgattagactagtactgatgtacatttagtttttactaacaaatatgtttttaatgacatagga

SEQ ID NO: 14278 - DNA, 645 bp, Aquilegia coerulea
  Intron number 12 from transcript AcoGoldSmith_v1.001017m ( locus AcoGoldSmith_v1.001017m.g) derived from phytozome v7 .0 (chr-ID scaffold_72; pos 43441 to 44085 reverse strand)
cactgttttggaggggcttggtgcccatttagaaggtatggtgtcaaagctgcaattagttcatacaattttatttttaggatttcttggtgaagttttcatacttcactcagcatgcaaacatgtctagaatctagagcaagatacaatgaatactgaattaagacatttaggaggaggcatataatattgaagcttactgtcctcccttttaagtaaacttcaattcaaatctagttaaaaacttgaatctgatggttgtagttcatataatgtcattatcactccagagaaaacaatatgcataagaaaaagatggtctgagacatcttccccacatttgctgatatgattgccccatcagctgaatgagagaattcactcaattcagagctaggagataacaaacctaactcaattaggtgctgcagggtgtttgaggttggctgttgatgggtctataagaattttatggcctttctttcaacagcatcggcatatttaatttttgtattatctgttatactctgttatatcatgttttttgtacacaggtcacatctgttatacgctgttatatttgacaacttgcttcttcagtttgtgtgtattctgaatacttattgctaatttgctatacagaaa

SEQ ID NO: 14279 - DNA, 4141 bp, Aquilegia coerulea
  Intron number 10 from transcript AcoGoldSmith_v1.000189m ( locus AcoGoldSmith_v1.000189m.g) derived from phytozome v7 .0 (chr-ID scaffold_3; pos 7654934 to 7659074)
ggtactaatcaaaatctttttccacgtttatttaaatgatgctttaaaaatttctttaaatgatgcttgcttatgtttctaaaatgactatgttttatgcacccattcttttcttgctacatatgtgatgcagtcgtgcataaagatatgtactttgaatcgaattcaaagaactacgacgattttcgggattcgacaaccaatgttcttaaccaagaactcacacaaagagaagactcttctcaaaacacacaattcaattaaccaatcaaccctaacttggccaaaagcctacaactctttaaataggaaaaacaatccttggaaaacaaggaaacctaaacctagaccaattctaatgaaaatagaaaacataattcgaaattaaaataaccctaaaatagaaataccctaaaacacctaaaaacaccaattaaacataaacctaaatatccccaataatactaaaaacatatagtagtaacttagcaaaaattaggggttttaaaccctagaatgtattagctctccccgggttcgaaaaagttcgtccacgaacttgaatctttcaaattcaccaaaacaagtagtagttgctcgttggtgctgcaagctcgaacttggtatgtgtaaatcaaggagtctacctcgaattcttcccaaaaatctgctcactctcataagaagcaatagccccaaaagttgaattcttccacgaactttaattgcataaaaatcaaattttaggaacctcacaaaacaatgatacttgaaacacgaaatccccaattgttttccatgaaaagaaggaacaagtcgctgaaaattggctataaaagattcccaaatcggatcaacacatacaccaaattctgtaaaaaacacatcttcaacaacatctagggattcttccgcaaagagcgggaaaaattcattcaattcgaatgtttttgaactatggaacttggttcttgtaacctcctctttctcctcaaagatatcaaaaaaatcacataaatatcgacatccttgttttgtaaattcttccatggattctttgtaaacctggcgcgcatgacatgtagcttcgaattcttcttgtgatatgcaaggcctagttgaaagaagaacaaatttcttgcctttccatagaatactataaccattatgttgcagattaaacgttgcatccgtttctaatgtccatggatttcccaacaaaagatgacaagcatccgtgtcgactatattacaccacacccgatcaactatatctccaatggaaaactcaaccaaacaattgttttcaaccacttccaattgtaatttctcgaccgctagttttgaaataaaattaacattatgtttagggtcgatcacaaaagaacacaacttgcctccaatagtacacaaagaacgaaaagcatgatcctgaatccaatccttatgccaattctccatttaatttaaactaataccaacgaacatgaccaaggaaaaaaaaaaaaattgatttttttttctgcgatgaacactaacaataatgaacagtaactcgaatttttttttttttaattttttaaataccttaaacaaagcagcggaagactttgaaaagagcggtggcagcgagggcgcttgaaacaacgatgaagatgaaaaaaaattcaggatttttgagaacttagaagcctcaaaaccttgctctgattaccaatttgatgcagtcgtgcataaagatatgtactttgaaccgaattcaaagaactacgacgattttcgggattcgacaaccaatgttcttaaccaagaactcacacaaagagaagactcttctcaaaacacacaattcaattaaccaatcaaccctaacttggccaaaagcctacaactctttaaataggaaaaacaatccttggaaaacaaggaaacctaaacctagaccaattctaatgaaaatagaaaacataattcgaaattaaaataaccctaaaatagaaataccctaaaacacctaaaaacaccaattaaacataaacctaaatatccccaataatactaaaaacatatagtagtaacttagcacaaattaggggtttaaaaccctagaatgcattaatatgtatgatttactttgtttgatccggattcgggatctatgcacgaatgaagtgattgagttctgggtaattttgtccacacagtagtgttgtttgggaatttaggatgaggtggattttaacatacattggagtacgcattagctagatttggggctttgagaaagcatgatctacaaggcttgcctgtccagcaaattactcttttgtagaaatgctatatgtatctttgttcaaaacgccttaaaatcgtcttcatatcgtattgaatgcttgttccttttccttgattcactgatcattatattcccttggattgtagatgttagtgcgccatctttcttcattttttgtttgctcatgtctattagaaactgtgtcaacttcaacgattaaaaaatggagattgtcaagtagtttcttggagatagatgccactgaggctaagtgtggaacttcaaagtagtacatgtgctacgagaggcttttatcattgcaactctctgtgtagaagtgaaactttggtcctcattttggaactgaatgctggtagcctctattatgtctatacttatatacttatatttttgggagctaggattggtgtgctcttgattggttatgcgcatggtctaccattcaaccctatgaggtgaaatgagggctgacttttgattgatgagtatgtgatctcaacaaaatcatctcattcaaatgtttcgaatctaatcaaatatgacttaaagttggaatgatccccatgatgggaagatcatttttatctgaagtggaacttagtacctctaattggtgccatgtgtaatattagggtacattggtgatgtttggaattcactccatgtttcattttgtagagaagcggaataatattatcataatgcattgttacaaataaagaggcaagattgcctttatataaagacctactaaaccctaattataaaccctaatatgggaattaccaaaccacccttatactctcaatactccccctcaagccgaaatatacagactctgtatatttcaggcttgcaaatacatatatctcaagaataacaaattcaacactcccacaaatctcaatttccaaacttcagccgcatgcatcatcttcaaatgagcacccaataacgacaaaagaggctccaaaacaacaacaagaagaaaatcggttatggcatgaccgaaacccgaaaaagagcccattatgggcaaacaaacaagtagctgtgtagggaacaaaaagggccaatagaatactaactatgacataagaaaattgcttttcgagaaatgaaagcaaacaattggggcaacgatgatgaacaacttgaccaacaagaatattgttcaaacaaacaaatttgaacaaatgaataagaaattgtgatttgaacaaagtgaacgagatttgaacatccaaattatatcatcaataataaacattgaataacaacggaaggagtatgaaggtgagagtgaaatttgaaatattaaggagtaaggaatttataaccaatcaaaataataatctgacgaaagcagaaaaaacccccgataatgaacagtgacacgattctataaatatatcaacatccaaccatgattatcatgaaaatttcgcatcatgttcaccataatgatcttgacaatctgtaaaaatttcaggacgatcggaaaacagaaagagtttcatccgatcaacaaaacaaaactgcacagaaattctgcaacttttgagagttttttttttttttttttttcaaacccaagatctaacctaggagttgtgataccatgtagagaagcggaataatattatcataatgcattgttacaaataaagaggcaagattgcctttatataaagacctactaaaccctaatatgggaattaccaaaccacccttatactctcaatacatttgttagactattcgtcaggtttctgttcttttttcataagattcacttacctttgtacaggtttgagaaacaag

SEQ ID NO: 14280 - DNA, 1220 bp, Aquilegia coerulea
  Intron number 2 from transcript AcoGoldSmith_v1.026006m (l ocus AcoGoldSmith_v1.026006m.g) derived from phytozome v7. 0 (chr-ID scaffold_3; pos 1257566 to 1258785)
gtaacttgttcccggtaaatgctcattccttttcttcattagtttctttgtttatgttctgattacactcatttataaggtttttgctctgttaagttattaccatgatacatgacctagttgcttctcctcttctctgtcaagcattgcgttgatttttattttcaagtaagaagagtatagattttctgggtctgacactttctgcatattcacattaattttgaaattgatctcccttttcattttattactttaaaacatgtccttttcttatatattcatccgactcttagatggagtcgatgggataccttatcattctcgcttgatgcgttgacaagaacctacatcttttacctgataccttatttatatgttcaccatgatttgtacagatcagagaatcctgggttctgttatgttttatctcaaatcatggttgaccccaagttgtccactcttgaagatatgtttagattaacctacaaaaaaattaacactaattaagagagtgtgaagcttcatttcagttttgaatttatctcgttcacgacctactatctgatttcaagctagatgtaacctgcgattacaccaaattcaccccttaacaatgtactttctcagccatcactgattataataaaaagaccttaacaattacttctttttttgctatttactttttgatattctgaaaataactgaccttggtaacatgagcacaaaatatttattttggacgcctggacagactaaaatgcatagaatgtcagttaggtttcttttgagccatataagaagaggaacaagaaagaagagagaaatgatattttttttgtttgtgggtatgtgcttattagtttccctgcatccaagtgttctttttttacttgtgtgattgtgtctgacattaacacattccatatcaatattgtgtttgtgtgggtgtgtgcttattagtttttctgtatgcaagtgttcttttttacttgtatctgacattaacacattccatattaggtacatgtacgtgttgcttgaaaagcagagctaaatccatatgtatctttatttgttgcgaaaatgtatatattattgtaaggatatgcgaaaaatatgttaaatatgtctcactattcattgcaaatttgcaattgcttgactaggtttcttgtgcagcattaccactcaccaagggtgcttacccttgttta

SEQ ID NO: 14281 - DNA, 1516 bp, Aquilegia coerulea
  Intron number 4 from transcript AcoGoldSmith_v1.001180m (l ocus AcoGoldSmith_v1.001180m.g) derived from phytozome v7. 0 (chr-ID scaffold_5; pos 975167 to 976682 reverse strand)
cctgctgtaagttgctgtacatattagtttgcatcacactttgttctctctctcctttcttttttcttttaaatggactatgaagaaatgtcagaaatctgattttcatggtatggcaagtacatgttgcattgcattattgcatatgcctcttccttgtgctctatttcattttattcagtggcagtgccttacattttcaatacaatctccctaagctgattactttcatgtgctcattgttggaatcgattgaatgtttattgtactttaaagaaaatatctaggatcatattgtggaacccacacaaagttgagcatgaaagcttcttgtttcagtaatattcatgatcaattttgaaacctctttgagtgagcatctgactcatcttctacttccttaaatcctgatgagtttgacccaactttatgtttgcttgggttgaaattttgaatccatccaaaacttcgattggatttgtgttaatgccgtggcgatccgtggatggaacactctgagtgttatactttttgtctgctcagttaagtctatatattactaaagacaaaatttaacttgaaagaatgtttttttcccttgataagttacgactattcccctaaatccctttctccctgtgaaattgggaatcggtttcaagaccttgggcccaacctccctcccaagtcttgacttacatactaaacaatccttggctgaacctacgatataaaatgcaagacatttgtggtgaggcctggcagtgaaacgagggaggggttgttattggtgctcagcaagtgctaagtgctaactaacagtataggtagtacactatgagagagaatctcttgacatgtaaattttataattatctttttgtagcttcctaaattttgacttattttctgtgtacatagtattacctaaagctctcatttgactgtgatttttactgaaatgttgtattattatttggtgggattcaaatccaacttgggaatttttcgctcaatttgaggacgtagattattattatattttttagaatttgtctatatgtacaatttagagtcaggttgaccagtatactccagaatatcctgaaattcatctcaaaatttataagatagccttgatactggggaattgcatgacacatactgggtcaatcagcctgaaattgagataaattataaaattttatgactttgtacctcaaagaatatcatcgctccaccactgatatgccatgtaacgagtagcttgccttagattgcgttgaatctgttaaagttgggttacactccaaagccaccattatacataagttcacagagagactactctttgtttgcgtatggaggttgttaacttaaatactgttttatcatacacatcttagtgtgaaagctttcattaattggtttgtgaactttggagactgaatcaaagcaatgtgaaatgtataattgcctgcatgaatctcgtagtgctgttactttgtgcaggttg

SEQ ID NO: 14282 - DNA, 2414 bp, Aquilegia coerulea
  Intron number 11 from transcript AcoGoldSmith_v1.005675m ( locus AcoGoldSmith_v1.005651m.g) derived from phytozome v7 .0 (chr-ID scaffold_1; pos 7876461 to 7878874 reverse stra nd)
caggtaacttttttcactgtttttagatttgtggatattactaattttgattgagcggacatgcagtacttgatgagagtttttaaataataaattactcacatgactctgtcatttttgcttagttatgtatggtttcatttggatgagcagttgagagttgaaacattcatcttttagcaatatatagtactttgtaccttttgacgatatctgggaaatggaaaaatattccaactgggactttctaaaaggcaatatgaagtagagagcttcagtggattacctgctatgaactaacatcaagttattgaagttttttctctagtctttgggatctaacactgatacacatccgaaatgacttagactagtcgttgttagtggcacacttctgatcccccttgtgagcgcttgccaactgaaatctgattttaaactgagtacatagttagaggcagactaccttttcgatgacattagggaaatgaaaaatatactgcattggtttaagaagcaatgagaagagaggttcagatggattactgtttatttgaaggtcaataccaaggcttcggatctcattgatacatgtcccaaataggttacaattgttcttgataactgaagtctgacaccgaggagaggatattctcaagttaaatttaagaacattattagaagcacattattgattcccctagatatactgtatcctcaatgaaaattgctctgcgccattcctcaatctctactcatctgatttggagaatctcccaaaagtactcctttagtctcagaggtgaggccacccgtttcacagaaaatgggtagatacaaatcagctaatagatgaaaataaagagaatgatttggggaagagattgtgtgtggaatggtagtgttacaatgatacatatgttgtctggacattattgatgtggtggtgaggtgttagagagagaatagggaatggtcaagtgaagctggccatggttagcctgtaaagggaaagatgaaaaatgaggttgcacacaaatagtactctcagatgaagaataaaagcatagatggaaattgagttagctatcctatggtgacactcatatctccatcctaacgacattaatctagtttcttcttaatgttgatacgaccagaattggaccaaaccttatttgaactcatacaatttctgtgttctatattttccaaggtccgattgcaagtccactgaggatctgaaacttatcttcttcttcttcgctgttaacactttgaaatcttcattgttttaccaaatagctccaaaattatgcttccacagcttctaaatgatctagaatcttgctttttccacacttccacttagtagtcatcaattcttgcaaaaattgcaaaataataataataataataataaataggggatgaaatgtataattgtagcatgctcatcatccatgcagtgttgtagtctgggacatgtttgagccagtttgcacccctttggagagggtgaaacacagtgtcagatgctaaatatcatggtttttttttcttataaattttcatggtatgttactttcatgcaacattcatcaggcagagtcaaaacctcaatttcagcaattatcgtatgttcaagtctatgtttttcgcatctagacacactgttgtgtttatccttgtgaggattaatttcttaagatcaagcaatatatgctttaatgtgtatcagaattctgcatttaatatttagtgtctactggttctggtgtttcctttagtaaggctggatggctttgacaaggggtctgttgtacttataagaactttgacagagtttacaaccttagctagctaccacttgtccttgtgtctaacaataagcactcactattgtgttcagctacgcacatataagtttacatgctaacactcaccattgtgttcagctgttactacgcactatcatactattattttcaagtatccatgcatattctttgtatttccactttttaatgataattaatcacttcaagatcaaactccatatgcacgagtagaattgtgcattggatacaaaattttcactctgctttttgcaaagccttaagtagaacataatcaagcacatcctccagtgagtcgaagtcatatattttggaccatgttaagtatgacctctgccgatgtcatatcatgctaattttcacgttatggaatggtcctaatcacttaatcaacccttaagatgcattatccatgtattgtaataaaacggaacatgatcaatttttgttgcggtgtatgaagtactatatatgtaatgacttttgagtttcttgttaaatttgttgctactttctacagagctctgccctgggattcttacttgctcaaaagca

SEQ ID NO: 14283 - DNA, 162 bp, Aquilegia coerulea
  Intron number 5 from transcript AcoGoldSmith_v1.011126m (l ocus AcoGoldSmith_v1.011126m.g) derived from phytozome v7. 0 (chr-ID scaffold_53; pos 1160187 to 1160348)
ctcctgcagaagaaaaaatagattgtaagtcaacatgcgtcaatggttcactttgatttggtagtttatggatatagtttcattagagcgtgcttcttgcttgaacaattctttgttgttcttgctaatttttccattgcattgcagtttcatttaagctct

SEQ ID NO: 14284 - DNA, 1052 bp, Aquilegia coerulea
  Intron number 8 from transcript AcoGoldSmith_v1.016693m (l ocus AcoGoldSmith_v1.016693m.g) derived from phytozome v7. 0 (chr-ID scaffold_6; pos 6471705 to 6472756)
ttaacaaggtatatattatgatcattattttgtcttttttcatatcaataaattttgcatcattgtcgactttacagttctataaattgctctttgcaattgaatttaaccacacctcaagaactagtgctgcttacaggtgtgcacacactcagaccttaatcacccttgacgaggtgaaacccatggaaaggataggaaacgtttgggaaaacagtgtgtgttgtccgtcacatgcattctatttatttaatgatattataatggaattacagatgaggacatacttatatatgttaacaatcttcctcgagttggtgcatgaacatctcacactaaataacatcaaagaaaattttaagtactgtaatatccactacaggtaaacatccatatcagctgaaacattcagtatctttgttagggacaagtgcaaaaaatttcaacttgttataaacatctctgaattctgagattatctgctttcttttccacgccatacatgttcttcatatagctattatgttgtagtgtatagacttcgtcaatgttctcttgtcgattgggtttatactacttgttatcaacttaatattatgacaatggcatctggacctttgacaatggtggagatatgtatagattttggttgtttcaagaaatacaaaagctgataagcattatcagcaatatccccagtaaaaacattaaattcattattttctggttgaaatgaagaataaatgcaaaatttgagaaaatgagtcaaaccttggatacaagaacactaaaccagtgtgataattgataatctgtacgtgatttttgtgaaggtccaacaagagttggagtgagtagtgaaggagcatttgtagtaaaaggaatgtgcataacagatgcacatgccaactctttacacttacaataattaaatattgctatggctaccatatgcttgtttgaacgatgaaccacaagaagacttatattaaacaaaaaatcctggtaatccaatccgcttaaatttatagataactttgtttcttagcagg

SEQ ID NO: 14285 - DNA, 1570 bp, Aquilegia coerulea
  Intron number 1 from transcript AcoGoldSmith_v1.002827m (l ocus AcoGoldSmith_v1.002827m.g) derived from phytozome v7. 0 (chr-ID scaffold_20; pos 3515001 to 3516570)
caggtaatttcatttttttttttttaaccatttgtatattgttgttatcttcattttaggtgattctgtctccattggatttgtcagttttgtttgttgactctaatatattttgatttgatgagaaattagtatttgttaaatttgatttcatgtagaatgacattttaaaatttaatttctgttttagatcttaatttgtgaaaaatattgtaaatctgacaaacaaacaatgagcttagttttgtgcttatggtttttgtgaaattaaaagaatgaaaaagaagttcttgtcgaaagctatttgtagttttgtatagggcgagtcgtatagcatcaaagtaatgtgtttgagaagttgaagataatgattttctggattattttatctttgggtatttggaatattcccccctattgatttctaagcctaagcatatgagtccaggataagaaatagagttattcatggacaatggtattgggatgccatggagatgctgtttacattgaaactctgttaaagtttgtcttgctaaatcgcaacagtaaaatctcataagaatctttcgtaattccaactaagttgcccaaacttctgcctgtatattctgtttattttacaaagtatagtttatcgaatgattccttgaattatattgtttttttagtatctatagatttcattatttcacaacttttgcaaatagtacctgtgtttatatttatatattagcgtgttaatagaagcaggtggtactaataggattctttgtacaaatctcgaatgatatttctaattatttctaggatttgtgcgtcacatttgataggatagtgaacaggggcatcagatacagggggaaaggagattatgtgctttagagcggaaaccaaatcaattgacttagtaggcatttactggctcgtttctgtagtcatcatatcccacactttgatcacaagaatgattgagagaacggacatcatttaacttgtacaacctccttttctttgatcatttaaaatgtttattaattattgaacttcaaaagatattacaacagattcccctctcaaattgtgcatgcttacaggctttaccctcacaattacaaagatacagaacatagccacagttatcccacccttgtaacttggccaagaaaacgagggacctcaacaagatatagatatccacatttatccacaattctctaagtggtgaagcactgaagcctgtttacccaggatttaatgtttgaaatcgcagttgatgtggctgaaggccatggaagaattaaccttccaaacagtgcatatacttccattctaggtttattgtcatttgccttagtggccaataaaaagcctcccatgatctgcggccttattagaaacaagatttatatagtgttgttatatggtcattctgttcatattttctatagtatagctttctgctgaataagcagactttgttactagggtctggatgccatttcatattgtgcctaattataatggctttgctgattgccccccctttattgtagttacaggtaaagcc

SEQ ID NO: 14286 - DNA, 2505 bp, Aquilegia coerulea
  Intron number 1 from transcript AcoGoldSmith_v1.021884m (l ocus AcoGoldSmith_v1.021884m.g) derived from phytozome v7. 0 (chr-ID scaffold_3; pos 6369453 to 6371957)
caggtccatttcctgaagctgtgttgcttaaagaggtatatttttttatatttatccaatctttaattatcttattgtttgaaatactaaattgttttgatattattagtagctttttggagtataattcagggtttctctctcttgggaaggtaaaatgtttgtaatgatgaaatttgttcaactctatcatgcttatatgtatggaaatttatttggagttggtgtgtgtagaaatgccgattagatgtgtattttatgtttttgtgtgtgggaattggtttgtttgttttttctaatggggaaaaggtagtaagattttcttgccactatattgattttgttttaatggagaaacaagaaattgttatagataaatagaggatatcacctacgacaaggaagacagacaactatgaacataactagaaagaaatagaaaaggagagactagagactacaagataaaagggcgaaaattacatgcaaatgtatagagtggaattcatatgaaactcttcattgcttagaccagttgattccgaatatggtatggatgaatcaccatgagctttcattgggctattctcatactaaatttcaaaatttacagattctgtacccatcattttgatttaggcatattccaaacgtagccctttcaaatgtgtaaggtttttccatgcaccatacaccaagcaaaaaaggggtaccttgctcattggtttgttattctaaatgtgttcctagtacaatagggggtgatgaggtaaaagaaagggttaagggccaaggcagactgtgacctgtattcattaagatctcaagtacacaacacctctgcatcctcctttacaagtttacaacttgtttcatccattgcagggcagaagtaggatacactatggactctccccgcacctatagatgctagataatcagctactttattagcctctctataggtgtgagttacaatacactctcaaaccaaatacaagttgtaaatgtagctcataggagatttaaactgtaccatggtggtgcttctctctttagtagggcagttagctgttctcaaggactctgtacttacatatacttatttgattcccaagtggttagcaagttgtagtccttcctgtgctgcacttatctcctgccaaattactgacctgacagagattgaactagtgtaagctcctaggacttctccttcactcttccttaaaattaccacctatacctttttaattttcatatgttccaagggtaagggatcacagtcgtttccagtaatgtcaatctcccagatatcaaagttgctacgaaattctgaatcccaaagcctcacgtaagatgattctttctatatcaatatgatttatgatacatagaaagaaccactagtggcagttagaattttaaataaatagatatacattgaaagattagattttgcacacatattttttgctcgtatgcatactcctagaatctgactttataacccctccccattcctaacccaaaaggtgaaatcctgtctaaaatagccagcctccttcataatgcctctgtggaacccatgtgcagatgaattctggcatttgcactttcccaacccaggagcctaaaacatgcctagagataatcgtttgtctgtagggcttggggcttatgcacaattctgtatagccaattaccaaactctctatatctaaatctaaatagacgacatatggttttctcttggattcttaattctagtaaaaagtgagtgatggttttaaagcatagggttttgatttcattagtgacgccgcatgttagatggaacaatgtgagctgcacaccaaattaaaatatatgaaaggtcttcgatattctatatgacgatttgtataatcttagcacaactcaacatcattcaacagagaagtggaattatactcaacatcattcatctttgttagagtggataatgatagcagggttgtagttcttgtaattgtttgttagaacaagcacaacattgtaatctcatattagagcatctgaaagaaaaatgttccaatttaaataggttcaagattctagcatccttgttaggtggatgtaactcatacaagtaaggcaccaaaatgtgttcacttcttgtaacacaaaagatgctcaatgtatcttcttaaggtctcttagtttcaagtgacctttatataaggctctaatgccttcgaagttgcaaatattctttagcaatgtagagagattgtgagggttaaggcatttttctagatgttgcttgcctgtgctgatttgccttggcttggaagaattagtatgcggttcctggttccttgacattgtttgtttggttcgttaatttgttcagtttttttattgcacagatatcagctagatattagctggtgagtttttcatttgagttgcttatttctgatatggcaaattattttgagtttcagaagaaagttcaggagg

SEQ ID NO: 14287 - DNA, 1736 bp, Aquilegia coerulea
  Intron number 2 from transcript AcoGoldSmith_v1.011842m (l ocus AcoGoldSmith_v1.011842m.g) derived from phytozome v7. 0 (chr-ID scaffold_62; pos 558993 to 560728 reverse strand )
tgtatcaactaaagcaacagattgaaaaggagaaggtgagtggtaattgttttcttctacttgtgggacatataaacacattttgaaagaatagaatttactggatgttgttaaattgaacatgcagtgctttctgaaattcatcttactatatcttcaaaatttaaaacgcatacacgctagtgaagcagaaacttttcaactaaattaagtaccataagaaaaataccgggtgtctgaaaattttaaatctcgtccaagttcgatatggaaagattaaactattgatagaggaacattttgtatcacaacgacttgtctgatcttatcagaaaataattttgccttgttgagtgtgggtagtttagttacagtccacgtagtttagttacagtccacctgaaccaatgagatttttaagtttgtagcatatgatgttcccattactgaatgagatatttaggtttgaacatatgatactatcaagtaaactagtttacgaagaccacacgttgaaactgtaccttctattggcctaggatgagagctgtgcgattagatgagctcatatttagttgggaaaagataaaattagtaacacctgttcaaataacaaatagttccaagaagttctccattttcacttgacaacaattctgggaaaaatcttactcggagggaaaggtgtacttttgtaatgggtacttggcatgatacctcacaccttgctttgaacagaattatagttcctactgatcagataataagaggtaatggtgtgtgttttttgactcatatgttaaacactaaattggtattgaattcaaaggcagtgctcattgcttgcctatataaaaataggagtgaaacacattctttgcttgtgttttagggctcattcggcaagggcccagaaatgcatttcttgaattctagaaaggaaagaagttaaaagcttgttcggcaaattataaaccagaaatagaaagtaacggataagtcagaaatctgttatcagggaagttttgattcgtagctttctcctttctccgcgctacttttcaggaaattccttcgaaacttctactcacttgccgaacgggcccttagtgagattcttcgaagtggtatcttaactctttcattgtaaagtcattgaattgtgaacgtatcttatgttttaggctaggtgacagacgatctcaccaaatccaatagcatttatcccataatgaaacaaaacctgcagaaactgttccatcagtagatgttggatgttgcaattccttataaattatggaatgcattttatggtgaaattaatgcagtcaattattgcatatagccgatgaagagtaaaatgggaaaattgtcttgtaatgattgagcaacctcttaacataaagcatggtttctcctttgaaatcacttcattgacaaaatgtattatattccttgtgttttagtggatatacggagaaaactcttatcaaacaaaatttcccctttcccacctctttattgatgggatttttgtttagcaattatcctcacccaaaaaaagattccggtaacactatccatgcttcactttatgcacattgcaatgcatctctaatttagtaggccattatattcatgtagcgtcataaccagtatggtataaatttttgtttcttttttattcatttttaccttcagctcgctttgtccactttgcaagctaaagtagaaaa

SEQ ID NO: 14288 - DNA, 2400 bp, Aquilegia coerulea
  Intron number 1 from transcript AcoGoldSmith_v1.006183m (l ocus AcoGoldSmith_v1.006183m.g) derived from phytozome v7. 0 (chr-ID scaffold_82; pos 902728 to 905127 reverse strand )
gggttacactagcaccataaggcattgaatttgaggtgagtattttatatgaatatttatatcttttatttacaagctaagaattcatttgtgtgctcaaactcattgaagaaagagtctttttttattctgttagtgaatgatctgttaagcacattcttttgagtgttttctgttcagccatctagttgccatgaatttgccgtcctggactaaacaaatccaatattaaactagatgtactaggaagctgttgtatttattatcatagctagtgtgggatggccatcacccttttcgaaattttttgttcctgctagtgttccagatttgtatttggatatggtgcttgatttggtagtttgcttctctcactctctcaacccccaacatgacacacttgttgcaagctacctaataagtaataattcgttgtccacatttctctgtacatttaatattcttatttaacgattaattaatttttctcaatatacagtttttttggaacattaaatatactgatcagtttagatattatgttttaaattgaggattttagggcttttggaagtttccgagtctgcgttgagctggatttgatttttaattggttttgcttgaatatatatatatgtattatagttgtggttttccttatttacgaacataaccttaatttggcattcaaacattgagagagggacagatgaaacattaagaattagaaagaacgtaaggttttggtgtgttttagagatcttgtttttggtgtgttgtaggatatgggtattcaccaattcttgtgtttatttggattgttgtatttgatctgtgaggttttgactttttatgtgtgtatttttagacgttttgatataactatgataaatcatctgaagtatgatttggtgcatataaaagtttatggatccaattttgagttaggaaatggaattagaatagatagaacaggcccttatcttgttaacaattgtccagaattttgtaacctagaatacataaacaaatatcttgattgctatatataaagcatgaataggcatatgtagtgattttggtgtcacacctttttttatatgtttccagtggtgacttcctctaaaatcacagtaactacagtaatcattttgtttttcaatgtagaagtgtttcagttttgattaatttggactcgactcttttaactttaatagaagcattgtttcatatgtgtgtgttgcacgagcatagcacatgccagccacactagttttagtatgaacattatgattgtaccactgtgggcttaagcagtctatttaacatcaaaaatttagtagaaaaatcttgatacttgcagaaaagttggtaatctttaagaatagaggattgagttgactgcacctatcaaaattcacctatcgataaagaccgtgtttttaatgatgaatattttgtatgatctatgctggttgagagtattttttgactatgtttgtaatatgctttgatttgtgaaattaaggctttataggaaagatttgatagaaatgtagtcggttaagttgagtaaacattcttggaggtagctagatttgatatttgtattggtcatataatgatttgtgatcactatggtaaataaattagataactggattctctgtactgtaatggggtgtttttcctttttgtctttttctcgatctgtttgatactattggatataggattcttgtagtttaattattgggagagcactcaaaactgatgtttgtttgagatgaattctcaagttgatgtgattcttgggaatagattgtcagggtggtgtctgagttgatgcctgctagtaatcacattaccagcagctacgagacccggaaaggtcttcatgttttgttttattggtcttaagttgaaaattggggtaatggtcaatgcatctgttagttttgagttcgttgaaatttgttatataaaaggtgcaatgagaaaagtgaccataattatgtgctttacgtgttgtgttgaatagtattgttaggattatgtgtgcaatgagaaggtaaaagttgatatgctaagaaactgtagttgtgtgttagttgataagttatatagaattattatgctgtgcaatggtggttcatacaaatcaattctgcaggttggacttgccattaacgaaagcagtttatggtgagattggttagtaatttactgatatatgataatggataccatgtttaattagactgttttatttacattagttatggtcctagcttgtttttgtatacaatctctcaattcttacataatgctgattcttatttctttttgcaacttgaggatgcagtgattagaagttgggtaggtagcgcgttcaagggc

SEQ ID NO: 14289 - DNA, 4348 bp, Aquilegia coerulea
  Intron number 2 from transcript AcoGoldSmith_v1.007824m (l ocus AcoGoldSmith_v1.007824m.g) derived from phytozome v7. 0 (chr-ID scaffold_6; pos 4674573 to 4678920)
cagtttgaaaggtgtgtgaaattcattctgcatatattacctttatgttatggaaaagatctacatgttcaagttcattcagttacatggctactctaattgtttcggaattgtatgtcctgtacttactctccttctgatctacattgttcattcttgtgcatgtcacgtccttgctttaatttactcatgactcaaccttgagataagttctcagtagtgatgtgccttttgcatgtgctggcatgcctaaatgatagtttatgatgaaacgaaacttaactgcttaaaatttgtggcgatgactcatgacctgctcactctgggtacaaattctccaaaaatgccagtttattcaggctttttaagtatataaagttttatgtgctagaaatcaatcatgtacatgcagaatcttgattatcctgattgtgtcctggcttattctgtgctatttgcctcattttttgattctgtacttgattatcttacaaattgatctatcttttatatatgcctcaacaaggttatagtgtgtgtcttctatataacagagtatttttatgatgaaatatcatttgcagattgaaagttctatatatttccgtacaaacaaaaatctcaattcacttgactccatttggtgacaggaattctttataaatgaaaaccgaatttgggaaacacgagtccctccccaaaaataaaaaaagaagtaaaagaaaaagaaaagaaagcctccgcctaaagacaactttcaattagttaaagctactacatttcatagtatgaaaacaaaggacaggaccatgtccaaggccaatagtccatctctgtattctaaattggactggatattatttactgtagggggacaggctgtcagtaggcgtattaggagacaaacatcctagatataatggggagcaactctttggggtgattatgtctctgtaccttgatataattgcacttatcttatatatggtagtgtgagtgaagctctaagcactgttctattctatatatagagtatgttttaccgatcaatagtagaaatatttataagaagataagtggattagatcatggcatctggagagaagaagagcaaaaaaacaaggtgagactgcgttaatgtattgattacgatgtccatattgatgatttaagtgtcaggtcaaattcgagagatttataaaaagataagttgactaaaggattaaagcgatgacttgggcttggctgaacatgtctcggaattacatggatttgcggaagaagatcaaattcaccgacctgttgtttggatggaggtatgtaatgactgaacaatggtaaatttcagggttttaaaggctgctgaagtgctgcagactgggatatggtttcatgagattagtgtctgtctgtcttagtcaggctaatatgtttgttctggtcagtctactccaagttatttgagggtctgtcctctgtgggagagtgtatcttaacaactgacggtgcaagtaacttgtatgctgatcagtggatgtaacaactttaaattggtcttaatatacttttaacttcttattaaaaaaaaaaaaccctaaaggatcgcatggtgaggagagaaaaaaaaaggtggactcagttagtgtaggaataagatgtgtgggtccatgagatcagtttcaatttattttcttagttatatctatccaacgataaggtgtgtaagaagcttgccgggtagaaatctaagtcactctcaaaagcgggtagactcactcttaaaaagtctaccctttataccattccgagttattttctctctcttttccctatgcccaaagggatggaccttcaaattgaggtggttctcggtagattcctttggggaggatgtgaggaagccaagaagattcattgggtcaagtgggatagagtttgtcttccaagagagttgggcggtcttgggtgtaagcaattgcttttagttaacaaggcgcttttagccaagtggatgtgcagatatggtgaagaaagggaggcactttggcgtaatgttgttgtagaaaaatatggcgaaggtggtggatattggggcataaaggttccaacaaaaccatttgggactatacattggagaggcaatactagtgaatggagagagatttccaagcacacatttttcggtcgggtaatggggttacaatccatttttgggaggatgtttgtattggaaggagttcctcgaggagtcaatttgggcattatatgttttggctttgtacaagaatgcaaccattgcggatcacttgcatgttagtgagaacaatgggggtggtgtgggaggttgcccttagcagacatctcaatgattgggcgatggaagattatgcctcgttgttggcggttttgtacaatgctagctcgagttttggggaggaatacaagaattaagattcttcagaaaagttacaagttcacggcgaagtcctactatgaagcgctcttgggtgtatacaattaaaggaagtttgaggggcatgatattaacctcaattccctttggaagagaatttggcctcttccgagttgctttcttctcttgggcggcctatcgagggaggattcctacaaaggactatttgatccggagaggtgtgtatgtaccaaacgagtgcccaatatgcaatatggttgaagagagtattaattacttatttattaattgtgctttggctaggagactttgacagcctttttttgacctttaatctaccttgggtgattccggtggatatttgcatggtgttggggaggagattgattggagctccctcactatctaaggcttcatggttggttgataacctaccaaaggctttgtatggaccttatggaatgaacaaaataggaggatattcgagaacgagtccaaagaagatcacaagctcttcatggaagtcaaggatctactttacgatcaagggcaagtgcaacttttaactgagtccaggtatcaagattttatttgtagatgggataatattgtcaaggaatagggtctagagtgtgtaaggggatttcttttgtaatggtctcttttcttttagctctcttttgtgtccatgttgtggttagtatcttgctaagtccacatcacatgaggggagggcttgtatttcataatgaaaataccttttattgatttttttttttcaaaaaaaaaaattattcaatgaagtaaagtcttgaacattttcttaagggtaagggtttttcaaactcttgagcattagtacaccagaacagcaaatgcaacttctcacaactgcttgtgtgaacagctactacgtttgaaggcagctgttgccttgattagaaaatcttgacattcaaatacctaagatggtgttgatgcgcagcatgaacttataaattcttgtttatgaatagtgtaaaaagaagaagatactgattgtcggcacaataagacggggtgaaccgtggtggaaattggggaaaacacattgccaaaataaaccactctgatacaaattgatgtgcatgaaaaacattgtcatgaattcgaacagtggaagagggaggactctataggagagagaatattagtgaaggtgatggatgttggcctgttgggtgtggcgcaggctggtccacgtattattcttatctcatccttatctttatatattaattttttttctagaggtggaatggtgcagttggaaacctggattggtgtggtgaataggcaattgctgctagtggtggaatgtgaggcagtcgattaagcaaatattgaggatattgtgcatgattggatcagcagctcagaggagcatggtgcgccaaaaaaaaatatattagataaagcgttacatacctataatatatggaaccacaactgctaaaattctgcgaaatctcttccctacaaaatacttcatcatctaactctgacttggcgatgttcctacaacccttcaaatacgaaaaccaaacttgggatagcttaggatgctagacccggactcctaatttacaaacttccaatattttcagaattataaaccaacactgcactgataagtgataaccataggcttaaacaatccttctagtatgttaattaattgggatgaaaattccggttgcatgcatcttttatctttgagttgaaattaccttcctctctgataacaatatcccttattattatgggttaaaagcttcatattttgtctgttcctttatttgggaatgctttactagttattttgcttatttgcaagcaggttagttgcattggctgcccagttggagggtgaga

SEQ ID NO: 14290 - DNA, 453 bp, Aquilegia coerulea
  Intron number 2 from transcript AcoGoldSmith_v1.003354m (l ocus AcoGoldSmith_v1.003354m.g) derived from phytozome v7. 0 (chr-ID scaffold_2; pos 3524984 to 3525436)
attttcaaagtgtcccaggtaagtagcaaggtcttaaactgtgcgagtaactatttgtccaactgccaactaattggtctgttgtattctcattgacacacaaattataaaggcattcagccatttcatgtcaaaattctaacacgaaagtggtatataaatttactcgttttctacaaaaaatattcgaaaatttacagaactatacacactccatttgattttttaatataagttgtgtattctttgaaatttactttccttaatcaagacatggtacatatatcttgaaaatcatttctccccttcctgctacattggaatgatcatgtgtcatggacattatggaatatgaagtttgttggtgaattaaacatggaattcttgttatggatgactgactttgcctatggtgtgcataatttcccttttctacagacgctgtgtctgtta

SEQ ID NO: 14291 - DNA, 3317 bp, Aquilegia coerulea
  Intron number 1 from transcript AcoGoldSmith_v1.006370m (l ocus AcoGoldSmith_v1.006370m.g) derived from phytozome v7. 0 (chr-ID scaffold_4; pos 5076460 to 5079776)
tggttgttgcaggtgtgttattcattcctactttttacgtgcttgcataaacataaaagaggatgtgctgccttttcatttttgttctgttatgttatctaaatgaagttggttttgaaaactgtatctatctctggaagtaaagcttttttttttttttttttttgttataagcctaaggatgtcttcgcccatctcatcctaagttgaaacattgtcacattccttaccaaactgaactctgatgtattaatgggaactaccccggggtcatggtgggttcagctgaaggagaacattgagttctcccacctgacgtagatgatatgtattttaataggttttggtaaaagtagacactatggggatgtcagttaaaatgtttagtcatcattgtgccagtataatcagattagcagaataatggggaaaacatggctgccataacacaagataagtacatgttagttacattctatattagtcagttgattaaatttcaaagagaagagtcgtcatgtctgttaataaactgtgatctgggggtatgtttctaactctttgttagcggtggggtataaacgtataattgattgtggttagaacctatctgggtttcagtttcttcattcagaaattccagtgaagtgatatatataatgtaccttgcttaagcattaatacattatcttttaccgataaaaaaaaaaaaagaaataggttttgggctcttcaccgaagtcacacagctacacacaacaccttaaagatacatggatggaagggaaataggaatcaaaagaatcaaagaggaattcaattgagactaaagggattgcttttaaatatctagattaaacatttggagtttcttttgtaggcacacctctttgttttgcaaatttatgagctgacttgtagacataatgtttttgtcatgttctaatttcgaaccaatggagactctaatgctcttcttatagccttggcacttctttctttcgagcagatggacttctaccagtctaacaaaatttaggtttgcttttggtcagtcaagagtcaagacgctagcacattcctttccaagcacatcttgactcctacgtgtcaactccttaacaattttgaacggatggacttttaccagcctagcaaaatttatgtttgcttttggtcagtcaagactcaagaggccagtatttcttttccaaacacatcttgactctgacctgtcaactccttcacaattatgaatggtgtgctcagacaagattttgctcccatgtctctaaaaacttgtagaattacatagctaaaaagctaaacctgggcaaagccttgtggggatttatttatttattttgggtagcaagtaaaaagttagtcacactaagatttcgatgacgaaatatccattttacactcgggtatatgtgaactatcaattcaccatattttgcaaacattcatgagtggatgccagaatgacacaattctttatgttgcaacccactcctgccacgcactttctatttatctgtctccatccaatcaaatggttccacggaagggtaaacatgccactagatccaacaactaaggatgagagagccagttcagggatcttggctagcaagtgtaatagactagtagcaatgatatgcaagagaagaccttgcacacagtatgaacatactataggacacggaagtatctttaacatgtaagcagctcagaagtaccaaatgaaagggaacctgaatctggacctatcagagaagaacaatcctctggttgacagcgaccgatatgtaatttgatttcgacatttgggaaaaccttagaatgataagacaatgggcacttactttctggattagataagaggtaaaacaagttgacctatatgcttccccaataatgatcctatctttaactgcccctcttctcctcatgtcacgacctggacaatttcctgaaaccaaaagctcaagaatgtgaccactagcgaaggtgtaccactttttaatgtttattgctggttatggcgtggtattataatagagaattatctagttcatcccaggttggagagaagttgaagagaaggtctctgatggaggtgttgttgcttttgttcgtacccttctcaaagcaattggaaatggcgaggagatgagagtgggaggaagtggaaagagaagctacttggatattttgaaggggatacagaagatgaagtcgaaattacttatgttgcaggggattaagaatgtcaagtggaaatagctgtagaaattacatattcaaataccttggatgtagtaagcataaaattttaggtgcttacttgaggaatttgtggaaacttgagtttgaatgtgatgataatagtagtccttcagagttttacgatttcccaaatgaagatgatgataagagaagtcatctcggttgatgcaaaatacattgtcaatacaacttcatagctttaaaagtacagggtcttttgtggatgatttggtgtaatgaatttggggatgattttaagttatatatgttttgtagtgttatgattggatttattatagtgtcgcatgctaagggtttttattgatctatacagtcggtttatgtagggtcttatcatggaatagtgggttcagtcctttccagtggtcttgttgtgttccattaccagtgctagtatacaagatcaaccccaataataatacttgtttcagatcctgtagatattaagcttccaacattgagatgatatacggttgcaattgccctcatatctatctcgtaaacataattgtcgactcattatgtcttaattttatgtattaatagttaaatggaagcatagaacaaggagtattagtactgactgaaactagcctttttgtaaaaaatgttgccaataattttgatacaataatgccatttacaatgtttgagagacttgttgaagattgttgcgtaagtgtaaactggaacaggatataacaacaatttggataggatacaccattcatatatatcagagagactggttgctaatattgcttaattgcaaactcaaaccaaatatagtctgtgtaaagaagtcacgatcgcttaaatattcttatctaggcatccggtcgcttaattatttttatgtaggcatctggtctgctcactgaatgctgtatagattcatgtaactatgtctatggatgtttattgagaatttcagtatcttattatgctcattcccttaatctgtagagaattaaagacgacttgcttaggagaaggttgcg

SEQ ID NO: 14292 - DNA, 1197 bp, Aquilegia coerulea
  Intron number 3 from transcript AcoGoldSmith_v1.022854m (l ocus AcoGoldSmith_v1.022854m.g) derived from phytozome v7. 0 (chr-ID scaffold_35; pos 2011217 to 2012413 reverse stra nd)
gcaagattccaaagaagagattcaattgtacgtatgtctgttatctcatctgcaacccaaaatcttctcgtattttcaaatagtaaattttatgccataaaccgattaaatgtgattcatgtttatattttgtcttagtatgatcgatacttttgttggtagtttattgtcattttttcttttccatgcatatgtacaaccgctgaaagattctgtgaacttttcgacttataaaagttatgccatgtattttattcattttggttcacgagaaaaaaaaaaaaaaaaaaaaaaaaccctctaatcatcatcatactcgttttggaaactttcaattgtataataagcaagtacaaagaaataccataaaaatggagacttgctagtaataggtggagatgaaccttgatctgaaatgcttcagtcttcggctggattttttcctgagatgaatttcgaactgcaatttaagttttttgagctacatttgagattctatctttagcttgactatctatggttcagatttacatccacagtagaacgttatgcaacatgcatgtttcattctgcaggtttagtttccatttttgtggtcttgttttattgtctcttcatcctgctcgttgttatgcctttatcgtagtgcactcctccttttgccattatcaacaaagcagtttaatttgttgaatgtagtcgtaggatctgtatatgaatctcaagttttaggaaagttttgcctctgtgattagttgttttttattaaaattataatccaagtaatttgagttaagaactatgattaaagttgcatctttgggattttccagttcatttgagtaaaagtagaataatccggttcctctaccaccataaactcaataaacagcagagagttgcctcctagcttagttggtacattccttatggattaatagcacaaacctagaacctcccgtaacacttcatttgttaagagagaatgttgaacaattccaaaatttggtatggatgatgatcacattattacgtacatatccaaccttaaggccacaacccttatctatatatatagatatctaggtgtataacctgtgaatgctagttgcatttaatcttgagattggtgttgacaaaagttgaaaatttgttcatgcagtgagacttgcacctgaggaagaatcattgaaatta

SEQ ID NO: 14293 - DNA, 2083 bp, Aquilegia coerulea
  Intron number 1 from transcript AcoGoldSmith_v1.004578m (l ocus AcoGoldSmith_v1.002175m.g) derived from phytozome v7. 0 (chr-ID scaffold_14; pos 2739035 to 2741117)
caaatactgaaggtaaagctttgaattttgttacttttttgaaacatttgagctgtttttttgtgaaaatgaaagtgattaataagaccaagactttgagtttgtcttacattagttaaggatacagtatatcaacagctaaactcagtgtttagtgaaatttggaactgatctgttcaattgaacttgttttgttttctaaacttttgtgcaaattgggaaattagtgatgttttatgggagcttgagttaactttatggtttttgacatttgggtacttgaagggaatctttaggtttaactagaaacttgtactactgagagctaaaatctgaatgttcccagggatgcttaaaaaatgttgtggacctattagagctatgggttggtatattctccaatttgaggaaatttttgccacgaaatcctcttaacccatttggtgtaaaaaatattagtaacattgtttccctgcaatataattcaaactgtgcaaatgttcaattgtagggtactacgactgtgctgtgcacaatcatttttcgttaagcgactatttctaacttgtataggttcttcattttgagggcataagttttttgtacgccagttggggtggctcacacatgtttagataattgttttaaccatttcagtatttcaccattttatgggtacacccattgttcatttctataaccttggctttaaaatacttgtcaacaggtgatgcattgcataatttgcggaccaatttggttgatcctaacaatgttctgcagagttgggatccgacccttgttaatccctgcacatggtttcatgttacgtgcaacaatgataacagtgttataagagtgtaagcaaccttcttcatgagccccttatagagaaacattagtttttccattccatttaagtgatagatgaagtctttttttcttgttttagcgatcttggaaatgctgctttatctggttcactggtcccacagcttggtctgttaaagaatttgcagtacctgtaagtgttggttgattttactcatgtatgctgctttagttccattgtaggagtgtttacatttgaagattgcttttgtaaaagtaggagattggcattgaaagaatcttacaataagagttttatccaactccaacaaggttacgttgttagtttcaattaaattagaaatgaaggattaagtcaccagctataagtttagatagcattcggaagtcagatgacccatagctggaaaggaggtcaactgccatttccttagctagttagtgagcatttctgtataaggggagtggtaggatcagaatcacatggttcactagaaagcagaaagaggcacatttatttatacgccctctttatatcggactatcttaacattatttgctctgctgtcaaaagcgggaataggctctaggctctcaccccatatgcctcacccttaagggcacctagatttgtgtctagtttagtctggtgacccttgatgttgcctaaactcattcctaacccgaggctcaaccccaaagcctagccagtgccactgcattactgttagctagatctgcaaataaatagcagatcttaatttgaacaactcacttactcttgatgtctaatcaataactagatgaaatctaatttgataagcatcctaatatcctcaccactttgcaaggtgtgtgattcaagacgatgagccacattaaaccaatcgtcttctaaaataaaatagagtgggtatgcattgatgtccagaggtgttcatggtagttgaaaaacaactcgttctcaggccactcttgcatctctgcttgaattagacatcaaattggggcaaagttgatggagtggtcggtgacctttatttgtgcataaattgtcatggtgtagttgaagtgaagataagtttgtacaatatagagaaatggagtgtctgcttgctattttgaatttgttaatgatttttttttttcaggacagaacttcaaatccattttttcttacctctttttctttacagggagctctacagtaataacattagtggaataattc

SEQ ID NO: 14294 - DNA, 464 bp, Aquilegia coerulea
  Intron number 1 from transcript AcoGoldSmith_v1.007980m (l ocus AcoGoldSmith_v1.007980m.g) derived from phytozome v7. 0 (chr-ID scaffold_17; pos 1257263 to 1257726 reverse stra nd)
gtttggtactcatttttttttttttgaaatattttattgttttacttgaatttatcaattttggtgtttttttgtatttagcttgaaattgggtagatgaaatttcctatttctgttttgtatttacgaattttagcttgattctattaatttgggcatgtttgtttttggactgaaatgaggtcaaacattcaccgatattgttaattttagctatacttgattaggcagaatccgtataattgaatggaattttgaatgcgagtacaaggtaggatgatccattgtacagtttttttttttttttttttaatttgtcttacttgtcaatctgagtatgggtttggcttttaattagggcaatttgttctactgtatgttgtcgatcttgtatactattttacatgaaatttgttgatctggatttatgtgtttctggctaggataggaagaacgaggaggtt

SEQ ID NO: 14295 - DNA, 2379 bp, Aquilegia coerulea
  Intron number 10 from transcript AcoGoldSmith_v1.000557m ( locus AcoGoldSmith_v1.000557m.g) derived from phytozome v7 .0 (chr-ID scaffold_5; pos 7072511 to 7074889 reverse stra nd)
gtacttcaattggtaagttaatgtttctttatggtagacgtctttctgtgtgtgtgtttactttatgtgcagtatcagaagatgacaaaaattatgagaaatgggtaatactcaatttaacaaaaatttgaaatgaaaataaaactggaattcttctttctgtcctaagattttttttcttgagtaccttatttttgcattctgcatgatctcaaatttaataacacctggacttttttacatgttccatctattatgaaagagagcatgtatatcataccttaatttcatgtaaatgacttggttgcatagtgattaaaaataaaagctgactggatttgtttattgttagaagttaggtttaaattgttcaaataggaagactgcacgtttctttttctttcttttttgtcaatagttaaaccagttgtttatttaggagagaaaagagaggaaagtaatacagttgtacagattaaagtggggaaggaattcacttaagaaaaaacataaaggagaagctaggcgttgttacactccagtgcttgaattataattcctcaatgtggagatccactccagattaattgagatagccacctttcacactatttaatgaaattgtgttttactggtgaaaaaaaaaagattaattgagataaccaaaaccaaaccttcagcttttcacacaatatatcttaaccgccttgtggaatgaatgatcttataattgatctatcttcccaaataattcaacatatagccctaaggtctaatttggaattcccacataactaagaaaagaaatgtctcaaagcagctttttctttatcagtaacattaattccaatgtcaacaaggttacaagtgacacatggcactctctaatttccttcatcaagacactaacgtaatacacaacacttacacatgtactggacctccattttatacaactaaagcacacattcccacccctctaaaagatacattagatttctcttaaacaagaaggcctctttcacatccaggatgataatgcaagtttttctcttcattttcaaaaattatttgaaggaacaaaataaggtggtggctaattaatgacccacaacatagaaagtgacagaatagatgtaacttcacttctgcaaactttggaaatggtggtctagggaaatggaccaaataaagaagattttattgtatcattagattattatttctccgtagtctatctgctaagtgatatatgattatagttaataaaccctaagacagggtaaagattctctaattgtggcagaggaaattttatgcgtagggggttagggttttcgtggttatgtatgcaagaatatgggctcattatggggtccctataatagcggttgattaaggggtcaggaaatcaggatggatatgccatggccacgctttagggcgtataagatcatttttatggttggtaggtaagatgaatatattgacccgaggaggtacatagaagaagagaaggaacagggatgaacatggtatctgcataagcctaagagataccaagctaggttgacatcccttatgtcactcatcatgttctacatccctgtcaatctcaagggtgcatgagggtcttgtatcactacaaccaaaagtaccattacaattgaactactagtgccctcaacatgatagcccttcagtttaccacctaacagcaaacattcggaccaatcttccttcagaccaactagccaacctattgtaaaatagctcaaagaccagtacccatacgttggtcatgtacttgcccccctccagttgaaagcctaaacatctgcgggaaaggttaccaacctgcaactcctacacaacggcaagctactcataacccagaagcgaccttaaactataacatattgggctcttatataatggcatggctaataaagtcttttgataaaatgttttgaattatggtatttataaagttctgataaggattgtcatttgttataatataatcttagtttttgttagtctttcatggattagtgttttggtgcttattgtaggtgctatgggtatctgaaatataattgtaagaagttaagcatctggcaataaagtttgtataaattttctttgatgtaggtctagacttgtagtatgttgcttgatgtcatatgcaaagttgtgaactgggtgtgaattttgattgaaattatgaaacaaatcaatccagttatttatttattttgcaatggttttggtgtgcatgtgaattttgacttgtcaatttggatgtgctcttgttcatctgcacttgtttgtttacattcagggactcagtggtcaggcactatcaggaccagatat

SEQ ID NO: 14296 - DNA, 2914 bp, Aquilegia coerulea
  Intron number 3 from transcript AcoGoldSmith_v1.023282m (l ocus AcoGoldSmith_v1.023282m.g) derived from phytozome v7. 0 (chr-ID scaffold_1; pos 9685776 to 9688689)
aatcaccctgctggtcctttcggtaccaaggtttgtaaaacatattttttattttttgtaacgagtttgattgtatgttgtatctgtaatgcactatgtttattgaatgggtgaatgaatttattcatgatgtaaatgctagttttgctttcaaatttctcaaaacttatctttgtcttattaattaagcctatatatcaagttatcaacataacaacaaatttgagattatggtggtctgtcataactcataaatcataatcaatattctgtgttccaacatacgggcgtgcttcacctgctgagagtagaggctactcttacttggtgcttttgttcttcatttcattattatttttcttggtgggagtgtggtgggatttcggaggtttcaaacctatagtttggtgcactgcattccacattctttttctcttggcatatatttataggaaaatttgctgttttggtcagtaaactttgcccaaattcacaatttggttaacaaacttttttttttattatttcaatttgatcagtgaactttttaatttcatacaatgtggtcaaacgttaaactaccgtctaaattatattaacagaaatctgatgtggcagttaactttcacatgtatgattgttaaattgtccacgtcatccgttcacatgtgaatataaattgttatttaacgactataattagatcaaaagataaaccatccgacggtgactggtcatcttctacctttactcactttctttttcatctccaccactgaagccaccattgccaaaaatcactttaattctgatctctataactttagcttagcttctcccatctcgaattaccctcatggagtccccagtaaagattgggtattacttattttcaatttttgttcattattttgagaattcaatttgggcctttgaaagaaagttaaaaatacccatgttgattacagtaaaaaaacgattgaaactgttggaagtaaattaattaaacctgtgtttttcttgatggggttttgtagaactgttgcattggtttcaagaagagttcttgatttgaaatttggaagagaaaaagaggagtactctttgttgtttgagctagtaatgaaatacgaacttgaaaagtaaagaaacagagaaatccaaataaccaattttgaagaatcagttattacttcttccaccgtgactatgtaaaatcttcatctttacataataaccttttaataattgaattcttaaatctgagagtttggctttcagttttttttttttaacaaattctttgtagaagataaacaatccagctgggttcacgggttaagatgatggtggttaaagtcgcaagtgggccaaaaatatgggtaaagaaaaacccaaactttttggtcagtggttgggaccaggtgaaaagataacagacatgtaggacagttaaatgacacataagcttgctgttaacggaatacagacagaagcataatgtctgaatacattgtatgaaattgcaacgtttgttgatcaaattgacaaaaaaaaggaaaagaaaaagagtttgcaagtttactgaccaaaacaacaaattttcctatatttatataatgggactgcccatgaatgtcaaaatttaggaattattagaaaaaaaaaaaaaatccttggttaatgacatggggccctgactggcattggtgccgtaagctgtattccaacatactggaggcacactctgttattgatgctttaagctctgtcatggattctgtgtcattcttgggataatatgtaactttcctcgttgtactcgtcctagggtgtaacacggggtagcttgtgtggtatgctatggatagtagaaatgcttcaaatcaaactttgtcctgcagaaagccatgttcatcatctaatttttatgaaatgagtctttaaaatgttctttctgtcatcagaattagagataatttatgatcaaccaccttccatgaatcattaatttgttgattgctcaaaatgtgcttctagtttgttagattttaacttagagtaatcttcaataaagtttagttgattaattccactagcaatatggatctgtgaaaaaagtggtggcttatgtaatttgtgtactgcttttgaggatatgaagttgttagccaagaaataatatacatgtatagtcacaagtgtttaattctggtggacagacaaactattaggcttgtaataacatattcttcagaaaagaattgcatgagatgatatggtagtcttaaattatcaagggatcagtgaacttttaacagtcaggtgagtggacaaacatcaagtggtttttatatgaaggagatcttcttttccctccccctgttgcattggtttatgttgtacaagtcttaatatttgcatttcgtttgtttgttgattattttttcttgctacatacagtactatgttttgtaaacaaaaataacaaaaaattattttatcaaatatctcatgtcctcaagaatcacatttattgacaatttatgattgttgagcattccttctggagagaaaaggcagtaaaatgaaagaaggcggattcttgatataattgttgaccatgaaatctttctttcatcaaaacataatagtgtctataatccaaactatttaaagtctgtgctggtgctttgaaagtttaaaggttgcatgtatggatcttgcactggcattaaattagtgtatttttttgatgtgtcatttgacttgagtaattgataaagatactggtttatattaaaaaatgtggttctactgtactcgaaatgtaatttcatgcctatagaaatatacttatatttgatgtctgtttgtaggaagcacctgctattgtccagtctgtctacgacaa

SEQ ID NO: 14297 - DNA, 1777 bp, Aquilegia coerulea
  Intron number 2 from transcript AcoGoldSmith_v1.002991m (l ocus AcoGoldSmith_v1.002991m.g) derived from phytozome v7. 0 (chr-ID scaffold_25; pos 1911325 to 1913101 reverse stra nd)
agagacatcggataaccattttggagtgtgtgaaggtctggtttcacttttgagcatgctacagttttgttgaagtatctagcttattgtttatctttgccgagactctattcgtgtgatgtctagatctgataaattataaggtgcatgtatattggatatttggatctattgatatgaaaatgcaagctacttatattaagttattactccctccatcccattttgataggctggtttggccattttatatgtcccaaagtatagtccactttcctattttcaaagagattaaatacccagtgactaatttaccctcaattaatgtgtgattatcttaaattgaattaaatgtagaaaaagaataggaaaggagttaaagggtaaattagaaaatgcatcaacaaaagtaattgttcccaccatcttaataacactttcttaatctgtgtgaaaaactcaaatcagcctatcgaaatgggactgagggagtatgtattttgttatgccctgacttttgaggggctttagctgcctcttccttttattttctgagtttggtgatacccttccttaccaattctaactttagctatgtaaacttattttacaaataaagtttttgtagctaaaacattaaaaattttgaaaagcagaaaagatttgagtagctaaagggagaaaacccacattaaagatggacagggttagactccttatccaaatagttgggagttgctttatctacttatcagagatgataatgagtcagtcgatatctcccctctgctatgacggtttataataataatctttcaacgtatctgctttttaaagcatatgatgtgggcgtactatctgtagttaatagacgttatttgtttatgatacacatgattgcatgtaaggatatgtaagtaacgccaacgaattacaaactacttggttttgagagccatgatagttgtctttacacaaaaactggttttgaaactcacatattcgtgtatggatcacaagtttccctttattttgttggccaagtaaaactcttatttagttttacacagccaaggatggtagaagtcctggaggacttcattctactacccaagtaacaaaaataagcaagaagaacaatataaacaatttacagattagctatcccactaggatcttacctagccattccattatccaattaaatcctcagaatgataccttttcctctcctcagaatgataccttttcctctcctcagaatgataccttttcctctcctcaatgcctatttttatcaacctccaagtcattcatagtccaaacacataattaatccaaatacacagacaggctcaagaacagaaaatcctctctaaaaatatctttacttggccatatgcctaccaatgtatttgtagtcttaagggctcacagaactagaaagaaaatttaggagttgttctaattgaagtaggaagctgagtacaatctaaccttaatgaatgtgtagaaaccattaactccctgaaaatagcaaattgatatctaaaatcaacggagattcaacccgcaatcatttagggatctaaaccctagaatttatctatatagaagtaattttcatgcatttaaaaatgcactttttattgatgcgaaatgacagactcattgcctgattgtaacattgcttgattagggatgaccagttcatagtctttctagtatacaaacagaaaaggcttgtaaccttctttatgcactttacaggattcag

SEQ ID NO: 14298 - DNA, 1666 bp, Aquilegia coerulea
  Intron number 2 from transcript AcoGoldSmith_v1.001832m (l ocus AcoGoldSmith_v1.001832m.g) derived from phytozome v7. 0 (chr-ID scaffold_1; pos 6640516 to 6642181 reverse stran d)
gtggtggtcgaaacaggtatttgctttttatcttccagttgatttcttttgctgttatagttttacactttttatgattctagcatcagtagtaaagtgaattttgtagctaagaagttatttgcatacaccacaacatttgataatgtcattttagttatgggcattttatgctttgctggatcttaagattaaaggtaaaacttgaagtgcaaattgtgagaagaaatataattccgttagatatcatatcatcctttgtttgtcagatttctagaggaatgacgtgtgctttgaaaatgcataatctagtaggtttgaaacagtgatatattgctatcttcgctacttttatcttcaataggataaacacttttgaagaaatacaatgtcttctcgtttatgtttataaaaaaatacaacatagtgatgattactttggttatacttttctttgagtgcctcatttaaacccatttttagatattatccaaattttgtagttaaatcccttcgtttgatagtgtttgggctgtattaggtgctaatttctttttcattaattgccttgctccttggtagtattctcaattaggccttggataagtttggtttttcacttttttgaggttttgaagggttattgtagctaggcttcgtgtaggatccacaccattggtgttgcttcatcctaatattataaatattaaataataaataatatttattcataatagggattgggcaagattgaaaatatgtatatgagtaaagttttgtacttgtagttagagagaattttttctgatttctctacatgtctcttttattgaatgttgctcagataaccctcttttttcacataatcaatttgataaaaaaaattcaaattataatgggattcatttccttacgaaaaggtgtctgatcagttgaattgagttatttaagtcaattcacataggttgtcctttgagggtctatcatatttagtgagatacatagattgctttctgatgttgaatcctaggttaataggcaagtggttgcaaatcccaactttttcacatggaaaattaatagaagttaagtagatataactagatgacacatgccatttccgtaaaaatctagaactggtaatagtcccctgaataatcaaaatatcaagtttcgtatgctcttttgtactgtccatgctcacgcaattccgaaaagtttttatttgtgcagtggtttcattaagaaattttatgtatgcggatgtatgttcttttatttttttttttgaagttagtcttgtcatgctaacatagaagctacatttacattatagttgtatatagccaactcataacatgtgcagcggttagtatatgaaatagacaaaatttattagattcgaataagtgtttaaagttgggtggcccatcacaaaatcagattagctatgtgcaattccttgaaattcatttatcgattaaaatgtggctaccgtcagatattctttgaattttcagattccgcttgttgctgggtgttcttatgatcagttttaccttttcagttttgatgattaaggattatgtttggtataatataactttaactagtttttggtttgtatacaggcgcacacctggtggaaagaaattgtgggaatcga

SEQ ID NO: 14299 - DNA, 2434 bp, Aquilegia coerulea
  Intron number 2 from transcript AcoGoldSmith_v1.025007m (l ocus AcoGoldSmith_v1.025007m.g) derived from phytozome v7. 0 (chr-ID scaffold_10; pos 2420421 to 2422854)
tagaaactgtaggactaatgtattgcaaagaaatgaagtagaggttgatcaagcaaagcgttcctagagtactccgcgttctcaaggtatgttctctatactatttattctcaaatttcctttatgtcttgcgctgatagagagctttaatatggttgtctgctttatatactatggttgttctcatgtttactgattaatgtaattcagttgtctaaacttaaaagacgttttatcttgtaaacattataaggtggtttccaattataagatagatatgaagtatcttctgaccattgtttgataaaagtggagtattcgatacaagcagagaattaaatcagaataagctttttacctcagttggtgcctgattgggacctaagagttcgcctgttcggcaaaccatagataatattgtttgtgaacttaaaattggttcttataaatctacggaagtcactatcttataaaacaacaaggatgttacatcatatgtgtagaaagctagaaatatgcaacgaaaaaaaattatatatgctacggtaacaatttctattgaaagcggaagaaaacattggaatatcggatatcagaagtatacaacaatgtgtaagagatgatatgtgtattttttttccccacttacaatcggttaaaattgttttaatcagattctccaccgtcttgttcactacccaccccatcagggctagagcaatgaaataatattacatggaaatagagtaaggtcgaactttttaatgtcttagtgtgatgttatcacataaattttgtggggggaggaggaagatagatgacgtatgagaagaaatttgatctaatgcaactatatggcagtcattgttgatttgttgctgttgctcaacacgaaggagctttagaagggaagagagatgatttactggtctcgacttcattctcctttatcctttcctttggtccttctactacttatataagttaagacttgagtgttgcaaatatttagtagtgaagagaaagacctaactcttaaggacagtctatggtgcaatttcagtaaatatgtcagtaggaaaataaaccataggcagatagtctgcagcctttttggtttcctcagtaagagagtgactaatttcttgataccaatgtatcatctatggctgtgacaatgtcctgacagtaccaaggtgtatgcgtattcttcccttcattaatgattgtgatagagtgatttgcagacgcaacgattaacttcttcatatcgttttgagttgctagtaagatatcttctagttcttgttctgctctaggtacttgatatatcaaagatatttttgtccccccctttcccctctctttgaatgcaactatgaaagaaagcgttaaagtcccttagactatcaccattgcttgttttctttccaaccttgttctggtctttcccaaatacaatgaatcacgtcttttgccttgcagtcagctggatgttctgagttttagattatcttgtacaattaggaactgagtttgtagatatgttctagtctccttacacaatcttgaccagaccagctgagctggatgtcttattagtccataatctctgcttggcccacaagtcacgtacttgctctgcaatcagctaagattagttgattgcagagcaagtacttgactggtatgtaatacttatatttttcgcaagttcctttcagtccataggctggtcatcatagcactaacataagctcgtatcacttaagcataagtctcttacccttacaaaattctctataagctggaatgctggatcactctgttgtcgttatttttgctattgcatctgccttattaatgtctagaatgcttggatttcctaaagcctctttgtgagggctctagatttttgtacaactttatggcattatgttccaaaaaaatattattcaggtagatttttgctaccagaggagaaatactttattcattagatcaattatatattcaattgttttttcttattcaagataaacgattcaaagtgaggtgttaatttcattcgtcgttattgcaagctgggattgcagaccactgtataaaatactggagcatgcagcagacgacaaaatagacattctatctattctgtgaaccagatgcgccaactactgatatttacctccaccatctgtatccaagttgtgcttggcccagtttcagacatgacattaaaatcctgaacttattatttatataattctctcagtgggcataaggtcgttcttgaatgtgaaattcaatcgttctttctccagcgtggttttcatccataaccaatagtatatgtgaaattcatgaaagttctacagaaagctaacattgaatgtaatgatttgcagatctccgaattgattggcttccagaa

SEQ ID NO: 14300 - DNA, 2104 bp, Aquilegia coerulea
  Intron number 2 from transcript AcoGoldSmith_v1.007275m (l ocus AcoGoldSmith_v1.007149m.g) derived from phytozome v7. 0 (chr-ID scaffold_43; pos 122149 to 124252 reverse strand )
catcatttcgggagctacgatctcctgccacccaggtgtgggtataaactggattcttgttgtctaaattaagtacagataatattttactgcacaaattgagaattctggacttctagcgctaaaaatatcttagtgataaaataaatgctgcagcttgccatttttgatctgagtatttgtgtgtgttcgttgctttttctacaatttactttattgtttgcgcaaagtattcttgatcttggtttgatgtaagctctgtttcctacacatggtttcttgtgatagaaaaggtgaaaaaagttgcttgacatctcccttgcaactattataacatttttgttacagttatttgttggtgcttttagctaggtatttggggagagagtgagaatgtgagatagaagaatcatgaaagagagtctatacaagccagagatatgcaatgttatgtgcaaaggtgttggttgattagctattgatttgggggcatttactgaaagttaaaagttctggatttcataagttattcatggaagtcaaggagctactttatgattgggcaagggtttaggggagtctggtatcaagattttatttgtagatgggatgaaattgtaaaggaataggggtcaatactcaataagtcaatagtgtgtaaggggttgtctcttgtaatggtgttttttcatgctgctctccaatgcatgtggtggttagtaacttgctaagctcacatcacatgatgggaggggttgttatctctttcattttcaatggagtaccttttatcgattaaaaaaaaaaagaaaaaatgattggtgtagcaatagatagggcgtgcctactgcggtgtagttggacaccggataaatggcatcatcctatctattcaatcaaagaaatcctcactttttaaaaagagaatcctcgaatttgaactctcaaatttatttttctgttggcatatgattgatttgaggtttaagtgattaattttgcaacaaagtgttctggctttgaaagatcatgtatttgctctcgttatggtgagaagagtttcattcatattttttttattgggatgctgatgacactatttcagtgagtgtggttgcctgggcccaatgatacgttcttttattgatatatggttgtgttatcagttttgatcttcagcccgatgattatcatttgtacaggccaatggtatttaattaccccaggagtatagaaattgagcaaaatctgcataaaaatataaacaaacatagtaagtgtgccaactacagtattcttttgaatcacacttttgaatttttatgaataacgtgatcacctaatattaatatgttgattcaaacgcttggataagtaaaacaaagtaagtaacaatcataaaagtcgtttcaagtcatgacaaaacactaagcttgccatatgtatgggctacttctcggcaagagacatctgttctcaacatagtacttaaggataaacaggacactaacaacaacagccaaaatggaagttggatggccattgttgtcggtggatatttctagttgtattacttctatgttttattttgtcgtgttatagctatactgataccagcaagaggacccttcacagcatgcaaatggttttggggaagtctttagtttgttcctttagcattctctagaattcaaactgttcttgttgttattgtggaagtctagtataatggagaagctgttacagaagtgaagtaatcggttaaagggtatggtcaagaaaaagggtgtataatgtggagtgtatgtttggatcttatagatcttgttttttcgttgtactaaagttttttgtttgtttagtcttctcttgtatgaagggtattacagggtgatgttgttgaattttccttgtgctttattttcatggttgatagcctgatatggatcaattatttgaggatttatataattccagagtttccaaatagacatataagtccttagtgtcttacctttttattcatttattaacaatctaaccattattatgtaaataatggattgcagaattagtggaaagattttacagttggaaactgtga

SEQ ID NO: 14301 - DNA, 723 bp, Aquilegia coerulea
  Intron number 2 from transcript AcoGoldSmith_v1.007424m (l ocus AcoGoldSmith_v1.007424m.g) derived from phytozome v7. 0 (chr-ID scaffold_6; pos 7715806 to 7716528)
ttttttgtttctctctgttcaaaatcgtttaattggtaagttttcttttaattctgcgtgaatttattggcaatttgttgaaattaattgtttttttttttttcttatgtagctaaaattcatattctctaggtatgatcatgtgtaatatggattttcaaatttgattttattgattagttggagttgtgaattgtttatgcaaatcataagaaatatcatttagggattgtgctgttttaatttgctttgtattgtttttggaggagtatgtacttttctttcaatttattatatgattgtattgttttaggtggattgaatgccatttattgaaagatggtatatgtgctggattttgagaaataaatattctgatgatttgatatgaaaaaatagatttttatgatgaaagttgtgtattagggattggcttttgtgaaaacttttaaggggttctatttacataggctattttgatgtgcattctttttaatatatgttgatgcaaatattccaagtatcttattccaagtatctttggatcgtactaaataatttattttttttctttcggggttgatattagattagataaccgtgaaattgtttattctgtattctgtgttctttatcaaaatatatatatatatatatatattttatagattatattttttgcatccattctgatttcttatctcatttgtctggatagattga

SEQ ID NO: 14302 - DNA, 1732 bp, Aquilegia coerulea
  Intron number 4 from transcript AcoGoldSmith_v1.022383m (l ocus AcoGoldSmith_v1.022383m.g) derived from phytozome v7. 0 (chr-ID scaffold_9; pos 3339630 to 3341361 reverse stran d)
tttgacactcaacaggtttgccctgtacctctcaaattataaagctttgttgggtaatacctttttatgtaattatccttatatccagtgatccactggtcaagacctgggaggttgggcccaaggtcttgggattgagtcccaccttctgggggagaagggatttaggggaataatattaacttacatggggagaaaggatttaggagaataatattaactataaaaaggttattattctgacaacttccatgcttatggttagaacaccaaagtttcaatacatcatattctttaaattgtttttgtggactgatctgcttctttttgtgtaaacttataaggctccgtttgtttcatgggaaaacaacatcccagaattttatttcccagagagtatctattctagagttcttacttctcccttttcttttgttgttagtagtgtgggagcatgatggtagaattttgaatatttatgcataaacaatattgtgtattttctattgaaaactcccctagttaaattaagttcagaatttcatggcaacctcccgaatgtgatctcgataaactctgtaatgtcaatgacaagagttttagatgtacaattagaaaccgttgtcttcagatgcatttttttatttaatcacgtacactacatcacacgcgtacatttaagtcataaacataacagccaatctatccaagctctagaatccagaaggttgtttgtaagggtactttctctgtttcttcttttcttgattgagagagaaacagtcaagttattgtagactttagaggtgcagagctccaaagaacaagggaagatgttgctaaagaacataaaatggagcaggaaataagagccagagaaagaacgagtcaactataggaagttcaaaagttccttcctgggataataattttccgtaaaacaaacacagtctgagttgtttaggtcaaagttttatgtgcttcgaggatagacctcattgttgttaaattgctaccaaatgctccacacttgctttttttttttttaatttctatgattattcccttatgaaattgttttttcaaggtaaatctttttggtgtatggtaggcgtatgacatggcttgcacatgatcttgttgtaaaactgctgtttgaagcggtagttctattacgcattacattatgataaaaagaaattaatgtcctgtgctgagaagtaatcaagtattaaatcaatgcttgatttacaaagaataagaacatcagtttagtgctagtgagcagaagtgaaaggaacatggtgtatgttatgacaggctgatctgtttgaacatgtagtcttacgggtagacataagacgtgtactctagcagtctagcttgctggtgctgtctaactataagatcaatttaaaatccgtttgttgttgtgctttctagaatcattgtctggatgttgtagaatgcctcgcttgacaaagtgccttcacacccttcccttgtgtactgctgtaacccccatcccaccaccccaccccaactctcctctcctctttctgtaaagataaaagaagtgagttattatttactcttttgagagttttggaacgtttttttttttttttttttttttgacatcggtgaagtctgctgaattattgtgggaaataattctctgtcttgttggatcctaggcctcaagggtattggatttggagaggaacagcct

SEQ ID NO: 14303 - DNA, 993 bp, Aquilegia coerulea
  Intron number 6 from transcript AcoGoldSmith_v1.020727m (l ocus AcoGoldSmith_v1.020727m.g) derived from phytozome v7. 0 (chr-ID scaffold_47; pos 1699774 to 1700766)
tccagaaggaatcgaaaaatttcgctttgatccatgtaactatcttctttccatattctcattttttaatctctagtattgtgacatgatctgcatcagtcttacacctatttttgctggttgtggggccaaatttttaaatgatttgtctatatcagactagtttttggtttgccaatcaatcccgcattgtccagaagtgacccatgttcataaatattaatttacttccgagttatcaattgtcttttgtcatgtcattgcttttcacatgggtcacttctagtctcataggagtaaaaagttctttgaacatggttatcgtgaaacttcactgataaagaaaagagccgctcataagctcttgaagaaaatataaaaaccaatatgtttggtgaggtttctcaagtaaaggtcagaatttatgaaattttcgtagttacaatggttttctatttttctagaaaggaatgctgagggtctacaatgattaatgtcttttgaagatgttcttgttatagagatagaaactctcaacatttcataaatcattaaaaaggctttcaaataggttttaaattctcaactatatcgaaagtttgtaaagttagactcagtcagattttgtgatgataatgttggtctacatgatgacgaagccatcaccacgatgaccaaatcataatgccttaaatcaccccaacatttttacgaggcccacaaatcataggttgtgcataacttttatcatactcatcgattaaaagtatttgtggctaaaattatcagaatcagatgattatctttatgaaacttgttcgccaaatcctcttttctgagttgggatgcaccctggatcaaactttcattacataggtttcatagttgcatacttatagtttgaagatctcattagtggaaaacttctgactaacccaatttattgtttgttgtgtagtggattttggtattccttggtgtaccctcgaaagt

SEQ ID NO: 14304 - DNA, 2635 bp, Aquilegia coerulea
  Intron number 2 from transcript AcoGoldSmith_v1.008400m (l ocus AcoGoldSmith_v1.008400m.g) derived from phytozome v7. 0 (chr-ID scaffold_62; pos 797764 to 800398 reverse strand )
tcatttgaagcgcatttccaaagatcccagtgaacgtatgatgttaatttcattaagtgtattgtgttaatttctgctctatctgaaactagctatcctctcaatttcccacagcttcttctatagtaaattctgccatttcaaacatttgttttagactagataatttttcacagaatctagactacttggagatttgggacaagatcagaagttgatgtaatactatcggcggaagcaaacaataataagaacaccaattaaataaatggtttgaacacccaaaaactagggttcttcacaaaaacgaatttaatgtctcaagacataaacaaatcttcaatctaatctccttaatagggtttgcaatcccctatttataatagcctaaacctaatcctaactaaactagaaagctaagtaaatagaaactactactagggatgttctaatccatataggaatctgcaggaactatgaggcatgtgccttgcacatgttatctttatgcatatgcatcaaatccccccaacttgaaaaaaactcgtcctcgagtttgtgtactaacatcctccaaagttcaaaacgactcttgtacatcaacctcaaccttacgttggtgcagaaaatccggccatgaatcttccccagatagttgctcgcagaaagaatgatagacattaatgtcataggtgcatcattaggacaacccaattgattggaacaatataaccgcatgtcaagaaataagaattgaaggtgtttgtccctccatggagaaaatccattctcatcttggaatagataaggatcaacataaccaccaaacaaattaccaattacttttatgggacggaatttgtggggatgataaaaataatcaatttgtcggtcggaatcaatggaattcattgattcatgggagtgatgagggaaattccgagaacgttcatcctctttaccattgtcatggacaacaaccaggtttccttgcttgggcaacaaataaaacttcttatttatcttccttgcagatttttcaatcaaatcttctacttgatccacacatgcaacttctaactcaagagacacaaaactagatgtatcatcaccaaaaacggaaaagaaatcaacaagattgtaactttgtaaaccaccaattcgagtacgagtgacgtatttttcttcttcaaacatgttgagtaagaaattaatctccgcttctttgtcaagtcgtttctcttcaacaaattcttccttaaaagacgcaaattgactttttaatttagtaaagcaatttaaaagttccttcaaacctttttgtatgcttggtgacgtcatggagacatcatctggataatgaggctgctgcagcagtaaaatctgctggttgtcgctattagaaacttgtgatgggtgaacaactgaggtggatgtgtagaggtttgacggtgcaagggctgcaaccaaactcttgttagcgggggcatcaccaaactcaaattctgcactagtttcatcatcagaatattcaacacacaaagaatcattatcatctgaataattatcttcataataactttccccgtcagaaaactcatcttcttcataatcaatcatggactcatcgctcttagaatcgatttcagattcaatatagtgtgggtattctccatacggagtaaccttagaattgcgactacgaagaccatcgtgatcataagtctttggacggtttccatgggaatatatagcaccataagcaacatattgttgctgaaaaccacatcgaggagggtgcgtgtcctgctggtggtgggaataatatccatcgtcataataactatgacgtcgcctgcgtggggtagaaggggaacgagaggaagagggaggttcataccttctggaaagaggaaagcggcggctaggatcaaagttgggagttttatattcagaatcggtataacgcttcgattcatgtaaactccagcgatccggcggcgacgaaaattctctttgacctcttctacgataacccatcttcaaatcaccaacatgaacgcggctcttgtaataaaaatcaggtttttatcttttaaacccagaaaaaacaagctcttgataccaattttgatgtaatactatcggcggaagcaaacaataataagaacaccaattaaataaatggtttgaacacccaaaaactagggttcttcacaaaaacgaatttaatgtctcaagacataaacaaatcttcaatctaacctccttaatagggtttgcaatcccctatttataatagcctaaacctaatcctaactaaactagaaagctaagtaaatagaaactactactagagatgttctaatccatataggaatctgcaggaactatgaggcatgtgccttgcacatgttatctttatgcatatgcatcagaagtggtaattttcctcattcgaaaattttaaagcttttggacatttaacatataactaaatagtaaatactacagtggttatagttgtagtatgttcttcctgttatccctgcttatttgaaacttgaaatctgctatatcatcatcatttatcattgcagagactgccaaatcgttgcgtgaaatcaggggacct

SEQ ID NO: 14305 - DNA, 1565 bp, Aquilegia coerulea
  Intron number 13 from transcript AcoGoldSmith_v1.002221m ( locus AcoGoldSmith_v1.002079m.g) derived from phytozome v7 .0 (chr-ID scaffold_76; pos 775212 to 776776)
gcgtgccagtgggaattggggtgagctcttcaataagcttgtttaactttttctaagtgttggtcttgctttatttattagaatatttaaatcataagtttgtcgttaccattacaagtgccactatggtgccaacagggaggttaccccgacacattactatgatatctaattttttatcaattcaatatgcggtgctggtataactctataactgcatttgtattacatacgatttccatgaatattttcacctaagtatcaaattttatacaatcattaatataaccttatttattaatatttcgattttctgtaattggtagatatgatgttttgtttacatagccatgtaaatccacgtagcattgcgacaaagtttgacttctcaatatacgctccctaaatctaagtctgtatatgaaactattttctagacgctcaatttgcacatcagattgtggtattatttggatcattttctgtattgaatgatatcagattgtggtattatgttcagttaagatccttaagcagctagcataaaatttatactctgaagaatatatgtttccaatcatttattttctggcaccttataactttcctaattattttttcaagataacagaaaatttccccttacaagttatgtcttctttgttgtttttattttaaattttccatagcatatagtcttaagtgcataattggaaaggtcctgtgggagctaaaataacttctttttctttagtaatgtcttcttttagtgcaatttatatcaacgcaacttgtaacctgtgatcccaatttatatgacacatttcgaaggtcttctggggtttttaggaaaaaaaaaaacagattgctatgaaagtattattgcctgaaaactttttcctaaattatgaaacgacatttgtgtttcgatagaaacaaaccttgattgtgatatatgtactctttctatgccgcttctcctagatagccgtgtagcataggcgtttatttatcctattagtcacagttcgttgtaggtactttgatgttgaagtatatgaacatttgaagaataattatatgatatcattaattttgtttttttgtgtatacattttaaatggtaactaatttgttctttatttcatttggagtgtaaactattatcttaagattaaactaaaattgagaaacacaagttacacacatttttttccacttgtggatatactattgaaccagttagtactcagttaagagtccgagtattattagttatgatgtgattaagtagtttgaaatgtgtttctgtgattttatgttttgcaaaaagatacataggttgcttggggatcatagatatctatacataagtctgtgtgaagtttagttttttaatgatgaaaagtgtttcttagaatgcagtggtcaagtttattaatgtgtagatctattattgttctctatttgtgacttctacagcttgaaccctcttatggtggacctcagcctgttgtttacaatccgcaggctacgccggtacaaggaccacaggcatatattca

SEQ ID NO: 14306 - DNA, 1648 bp, Aquilegia coerulea
  Intron number 1 from transcript AcoGoldSmith_v1.006751m (l ocus AcoGoldSmith_v1.006751m.g) derived from phytozome v7. 0 (chr-ID scaffold_9; pos 304096 to 305743)
tgaatcatcgtctccttttcgtaaatcaagatcaggtaaagtttgaaatttgtcgtgtttttttttttagattttttattatatttacaattttaaattgtagtgtttgatttgatctgttttcatctaccaacatattgatagatttgggacacattgacacactaattccaaatcactagtttggctatatatgttgcagttgtatatacttagtcactattgatcaaccagcctcaataatcatcttaacgctaaaataaaattttgtatcagcgaattacaaaattaaagaatcaaaatataaatgtgaagccactctaaattgggaaagggtgaaaacgccccctgcaaattagactgcaagctcaaagttgcagtcaattgattttgtgtgtattcaaagtttcaaacttcgtaacaactgatgtctgatagttgaactagaaccagatttttaagtcaattccgtctaattttcataacttcaattatttatttatttattgttgagaaattaaaaaaattattgataaactcgaggaattacacaaaagtaaaggacaaacgcgcgctacaaactgcgatgtgagtcttttctgaatagcaaaaacaatccttctgaaaacatattcattcaaaccaatagtgttgacattgttatctattattttctttaccgttttgaggagctcaaccgttttttatgccacaaacttgattgtgtcaaacgtaaatgggatgaaactgtgttggtttgccttacatgcctcactgtcttgtcatcctttgttttcgatctactaataacagtttgacctacctcaaaaatcctgttactgaaccctaccatcgggatgcccctgtaatgtcaacacatgcatgtatatctttaagccaattgtaaactaaaatatcagttgggcgtagtgttgatcgatttcccctaagagcattcccaatgcaaggtggattttggaggtggataaatctaccttaaaccagaaaataacaatccaatggaaagtggattttctcccaccttgaaatccaccatgtgggaaagagacgggttttttttttttttttttttttctaacttttaataagtgttttaagtttgttggactctcggacctatttttttggcaaaaaaattgggacgacatgtcacatgccgtccgaatttcttaaaaaatccactttctcttccaaagagtccactttcccttgaaaactctccaccttttacaatcccactttgattcaacaaggtggatttatcctagtggcgcacatgtggcgcctatgtggaagtggataaatccaccctgcattgggaatgctccaagtccaataagaaaattgatgggagtctattttacgtcctacagaatttcccaaacatgatcatgtctgtattttacacaagacaaagctcactatctgtatataatgggatcatgagacgataacaaagcttctttttttatatattttgctatttgtttaaaaaaaaaaaaatcttggttggttcattcatacaatatatttcagcatgcgagtatttgtttcgtatatactttgtaatcttttaatcttttttttttccacagacaatcccttaatttgtcaaggatcttgcacc

SEQ ID NO: 14307 - DNA, 1104 bp, Aquilegia coerulea
  Intron number 1 from transcript AcoGoldSmith_v1.001317m (l ocus AcoGoldSmith_v1.001317m.g) derived from phytozome v7. 0 (chr-ID scaffold_14; pos 204845 to 205948)
gagattgacagaaccagccaccacatacacacagagtgagtgtagtcagactcgaatagatttgttttgacgtggattttattagggtattccactttaccatcaatccaagtccaagcaacaagccccagattagatcattcacaatataggctttcttttgttatgggactaaatacccaaattagatatctgtaactgtaaccaaaataagtacagtattgggcttataagtataaatgattgggacttgggagagagaaatagagaatgatgatctcgagtgttatgcgcacagtttaactcctcaaaccgctgctcgctaacttttctttatcttctttccttttctttttttttttctatttctaaatataataaataaactcccctcttattattaatccaaatacagtactactacacacaaaccaataaccatccaccccccatgacaagctcgtctcctccttctttacactccatatcccgcatttacctctctctctcatctccaccactctcgctccttcgatcgatcgattctcaatttttaaaccgcatttatttatttagtgaattaattaattgtatttgttgttttttttttttgtgtgtataaataacaaatcgatcctcagaataataacaattcataaacagagaaactgatcgatcgactctttttttgtttttttcttcttcttcttcttttttaaattattacacaaacaccaccttagttatctatattatactttacactacacacagcaggaaaatttaattatatccagatctcaatctctccatctttctctcgtttctttccctatccaaatctcttatcttttaatccaaatcaaatataattcattcatcatcatcatcacaattcccacaacatgtccagtacaggaattatatttactagaagatggaaaaagcttgcaacaaacaccaattctacttctactattcggtccttcaatcgcccattttctcatctgaaatccccccatcatccaatctgcactactacttataccaataccaatgcaataactagtgctcattttaaattcaaccatcatccaaaattac

SEQ ID NO: 14308 - DNA, 1493 bp, Aquilegia coerulea
  Intron number 2 from transcript AcoGoldSmith_v1.010314m (l ocus AcoGoldSmith_v1.010314m.g) derived from phytozome v7. 0 (chr-ID scaffold_20; pos 3321088 to 3322580)
tgatcctggttagggtttcttacttgctctttttttcctctttagttttatttaatttgggtttctgatttgcgtttgggtaagctgaatttgaaaattgaaactattacttgttggcaaatcatgaaaaatttctaatccagaaacctcaaattactggattcgttttagtagtttttgcttgcagaaaacttttagattctcatttttcatttatatgctgtttagatttcatttggtttctgattttgtgtgatgagtagttgaatagatgaatctgatcaccatattaattattctgtattttttattatggattgtcataggttcgtgtcgttttttgaggaccttaatatggttatttgggctgttgttgacttgttgtatatctcaccatggttttttagtttactgacactttttatatgctatcttccttgttcgttttgtatcccttgtggttttcgttaaatgatgaacgtctttaaacaagcataaacttttttttttccatggagttgatacatggtgtttaactgcgccatttctgcttgtgcattgatgtggtcttgcctcactaagctgtcgttttgtgcactttactattccattgatttaagtgtttggtttaccgaggccctacatcatttatggggttctgatttgaaggatctgtgtttagattgtaaatcgtggggtactataatagagtaatagactatgaactgcccacgtgtttatcttaccctgcaccctgccattttatgcattttaacttcttaagtatcaaaagatgcacgtggatattaatgccaatacagaggatcaaaattcagttataggacataatgacaaagatgaaagatctggcttttttttttttttttgcttttttatagctagaatctatcttgagatcttctcttttgttaccccacaagcaactctcgcagtgcgtgtgggtattgaaccagtgggaaccgaatctttcaaactttactaattgagtggaagttatgatgtcattgttaattgacaaggataaatgtggtggatgtctatgactctatggtagtggatatttattgtcaaatttgaatttgaaattgttgtttaatgacaaatgtagggaaggttgatgcagttttgaaattatttccatcaaccggtgtttaaagattgtaattgttgggctttgttatggttaagtgggagtttgttgtatttctggttggtctctgttcatttaacacctccaagtttcaggaagcttttagtgatataactagcattccattaatatttccaaaaattcgttttctttttatgaattttcatttttcctgttttctttgtttgagatttaccataatacttcttatatgagaaagtcatcattcttttgattggcactgtctgtaatttcttatttaacaagctattgtatctgaagagagttacacattgtgcagaaaaggaaaacttgtgcttgt

SEQ ID NO: 14309 - DNA, 3035 bp, Aquilegia coerulea
  Intron number 8 from transcript AcoGoldSmith_v1.006143m (l ocus AcoGoldSmith_v1.006151m.g) derived from phytozome v7. 0 (chr-ID scaffold_65; pos 1211364 to 1214398)
gaggatttgggagtcaagaacttccatccaggaaggtacatgtcaaggcctcaaatttgttttatttttttaatgttagtacatttaccttaaggaagtatctcaacctgaagtgtagatttatgtaaacaacctggttttcctggaaaagttggaatgacttttgagggtctggaaggggtattcacatttttgtccttagggtagaagcatttcagttcgtaaatcatttctgacaaatatactacaaaatattcttagatcttagtgggcaaatgaaaagcaaaatacgtatggtgtttcaaggccctagcccttgaggggcaacggaagtgccaaggtttagttgttgttctgaatcctgaatctgtagtagcgaactatcatcatacacaaatgaaaaatcttaaacacaaaccctccagatcctgtaagaaccctcgagtcaaacatattggggtaggagctattctgaaaagaaaatttaaaacacataagatctttgaggcactgaacctgtaataggcttaagttgtacctcaaaggcaattgaagcatactcagaatgttggaaagcaaaaaacatatcataattacagaaaaatatgatcaatacaccatggcatttggataatattacaacaacaagctgatgtaaattgatgtagacacaacaaggtgctgatgtattgtgttacatccaaagcttaatatatatttccttttaagctttgagtcctgtactcctgttatggtttgagtcctatttatatgtagtgcatagccacaaacaaaggagggttgttgatgaatgtttgagtttcaattatagtttgtgttagggtttgttaatctctttgtgaattgagttaagtcttattgttcgccattgtttattgttaagtttatgcttctttaacctaatttctataattctgaaaatttttgcccccccccaaaaaaaaactgggcttgcagcgcagtttgtagcgcgcttgtcctctacttttgtgtaattctttgagtttatcaataaaataatttttcgttaaaaacaaaaaaaaaaacaaaaaaaaaatcaatttgatgaacatcaactccaagatgatcagtaaacagataaacagtatcattgagatgaacactagacggatgaacaataactgagaaaaggaaaacctttttcaaaaaaataaaacaacaaccttccttaaaactacttaagaaaactgtgctctattaagttaataccaaaatgatagggaaattaggatgcggaagcgttacacataacaagaaactacgacgaacaattaccaaaactcaactcaataacaaatagttaaaactcataactttaatcaagttactaaatgctcagcaacacctacctttgtttgtggctatggactacatacaaattgatgggcttttttgctagtcaagaaacctaacctttaaaagaatcaaaccttcaaagaaaacatatactaatcttgtatgtatcacaatacatcaacaccttgatttgtctacatcgatttacatcacaaacattatagttgttcaggcttaaatgttgttccttgtacctgggaaggccaagaagcaaagtttcaaaagtttttcatacttgagtggtttgagactgtttttgttattcgagcaagtattgaggataaagcccagaaaggaaattaaaagaaaaattgaaaagcttaaaatttgggcaagtttgcgagttaggatacaacatcaatatgcctcaaggtttatgccccaataaggtctaagcctcatacagaggcattgtggtgataaccctagtatggttttgttcatagaaacgtccgttgatataatcttcgatatacacataaccgggccatcctctatttacagttctgggctcacattcatatggaatatattagttcgatactatgagttgggcttgtccaacttgtgcacttgttcatgggttagtgcgacccagtatgactcttctactagggttagaagtctgatgagaactcttctctagaaagatcccgatggatattaatacgaggggaggtctctctgtggcataacataatacttacctattggaagctacgattccaaagaattgctttgttcattcgatgtaatcaaggtatgtcgtttacttgtgtttatggttcatgattgtatacctagatcttaaagatcctacaattgttggatatatcttgattacaggtaaatgacgtaccttgattacaccgaatgaacaaagcgattcttttgagtagtagaaaagttcttctctccgttaaacctaggttccatgctccaatgggtgaatattatgctatgccacagagagggacttcccctcctaatcctatttatatctatcaagatatttctagagcagagtccccatcagacttctaaccctagtaagagtcatattggctccgactgacccatgaactactgcacaagttggacacactcaaatccgagtacccaactaataaaatccatatgattgtgagcccaggattgtaaatagagcatcaaccggttatgggtatacacgaaggatatatatccaacaacgtcaagtgagcctcaaggtccttgatgcttttctttcatattgaacattgggtacaaaccccaagaggagaagtgacctctcgagaacattggaataagaccactttgatggagcatcgccagaattaagtgggcacattatcaccatgatgtcttggttggatccatacatcctaaggctggattttggtgtgcggtgctatgtaaataaaggccaatttattctgtaaaaatctgtctatacgtgaaaaaattattgtttcttttcatgtcttctgtcagaaacctagtatttaatggttattgtaagtggactttacactgtgtgttgatctgaaggatttgaatccttagtgaaatttcacttctactgcatggaggctttggttcatgctaagcgtttctcttacagatacttgaaaatt

SEQ ID NO: 14310 - DNA, 1060 bp, Aquilegia coerulea
  Intron number 5 from transcript AcoGoldSmith_v1.007026m (l ocus AcoGoldSmith_v1.007026m.g) derived from phytozome v7. 0 (chr-ID scaffold_37; pos 2371206 to 2372265)
gaagtgatattcgttcgtaaactgagtataagctcttttctctgtatgcatgatttgcggaactggatgtcttattattattactatttttatttatatcatgatatttcaagtcataatccatgaatagtagtgtatattggtatgaaatatacggtgtacacctttatgatatagatgtcatctctacagattcacatgcttctgtcttttcacattgacacatagctaaccacaattatttgatagacacatggatgtataagtctcatgcacgaggctaacaacatcaacattccacataagcagctgccttttagtccactagcctggatttaactaagctacatcctaaaaccccacccccttatttggggtcatcaattagaaaaaaaaacaaactacattctgagccttttaagacatggcagcattttacaccatgcttttagtaatcaatgtaatttgtaatttgtcaaatgaagatttgtttagttgttaatacatcatagacccttccccattacacctttaagacctcgttatctgctatcgattgttcttactagaacattagttagataactgggttataaacattatccctgtaagaaacgactcatgatatctgttaacggcctggtgacatgcctgtatagtattttcatttgattatttgttttccttttgtagctcttttcaatactgattttctgttctgaatcctcggcctcacccaataaaatgatataaaaataaaaaaaatagttgtaataaagtgaggacgtaggatgtggaacatatatgtaccataccttctctttgttcttctgcatctgttcaaatattcaggtagtcaaaggcatttgtaggatcctaatatttgtcacgaaggcttgactggaagatctaacatgaagacgagtccaagaaaataaagtgtgaaatatataacatattgttggttgttgttcactttatccgtctgtatacacaacaaaccacacttgaaaaagccagatctatattgactctgtaattctgttttctacaggtggat

SEQ ID NO: 14311 - DNA, 2958 bp, Aquilegia coerulea
  Intron number 1 from transcript AcoGoldSmith_v1.017170m (l ocus AcoGoldSmith_v1.017170m.g) derived from phytozome v7. 0 (chr-ID scaffold_8; pos 3554554 to 3557511)
aagactacgagattatatctggtagatttgccgtaattatttctccttttcatttttattgctattgctgcttaggtttttccatccttaggttccattttctattgtcactaatctctactcacatagtgtagaatcttgtcatgatcatagaacaacatttttgctattaaaacttggatatttttgcattaaattagaccaaaaacagagtggactctctgttttaactttcaacaatttagcaaaacaaactagagagaattgacaaagagccagaggtgttcttttatagcttatattataagaactgcaagaattcttattgatatggatatttggcctgtagcatagacatgtctacacgaaaatcaaaacactcataagtcataagtaataaccatttgagatatgcttcagaatgcaacaaattacagattcaaccctcagcagccccacatagcaaaacaaaagccgaagcccgcgccagcaactctgcttttaactcagtggcgcggtcctagctcttttcttgctgaacctgtcaccattcatcacgtaccaggtcctcccaatgcagtaacaagtcaatggtcctatgatctttcttcaggtctgccccttgtcgagttatatacagccatgaccacacagtcgcacagaacacttgccagtgcgtagaatttttgttggaaatgttttcaagtggtcaaaacatttgtatatgaatgagaaatttaagtcctaagttaaccactggccatggctaacttgtgttatagtagatgaatgggtatgtattcacatatttggcccaactcatcccaatgggtgtgtctttcccaatagacacatactttgtagacactcattcccaatgggtgtgtctgtcccaacagatgtgtacattgtattgggtcaggtgtctattcaaatatacattgaatagacatgtgccttttcaaaaaggtgtcttcctactatataagtgtatcttgtgtttgtcttcaaatcacttttaaaaatcaaattgattttccttcttctagtgtttgtgtcttgccatgagagagtataacaaagaattggttcgtcgtcttctatgtgtttgaagtgctgctacgctaagaaggatagatcgttgtatcctgggagacagtctgccattgataaaccgttcggcacatgtacggggcgaataatgtcttaaggagagagatttttatctcgactcgatctaaatcttgtccttcatccatttattctggtttgcatcatctattcccttttatttattttaaaacagtaatatatcggtgtgtattttcctacaattttatcgagctaaaacctgcctccagtgaatatgatgttgctccttattccccataagatccaccatacagtgagaggctgccatatggccataccaactaccaagcttgtgttaggacttaggaagaggttgcaacaatacaatcttaaacaacaccatgattatttaagacttcaggaattcctgacatatatgccccaagatttaaggcaagagagggaaaggaatcgattccatcattccgtgtccatatgttacatagagcacaatgattaagatcatgtgacgtcgtacattgagattatcaataagggtcaatttgccaatacaccccatttttgtgtcacgtttggccaatacatctcattagtctaaaaattgttttttccacctttttaacagtttgactcagttaaaagaaacagtcaactctttttgaccaagtcaaacccctgaaattacatatttaccctcatatttcaaactacctaaattttttgatttgatctaaaccgtcaatatactattttttttaaatctactataaaccgttgattcttgtgaattagaaggatatccagatgaaaaattaggtagaataaaaatcatgtagaacagtagaataagggaattgattattattgtaaattataataatgaggaattgaagaagcttatgcaaattccagacccattgctttcaaagtgatggattatggcttcaattgatcagaattcttcatatgatagcagagacttgtagagatatgttaagaagagtaccctatgagattaacgctttaatgggtgtttaattcgatgaaaagatcatacatttaacaaagatctacaacaatttgatctgttattagcttgtacagaattaatttagtggaaagaaagtaaatttcgctgtcattgacgaagtaactcatttcaacttctcttaattaaatgatgtgttagaaacttagaatttttttttattaagtagaaacatagaattggaaacagagaaaaaagaaatctttgtagaagatgacggacttatgggagtatagggactcacaaaacttcaatttagattccctcattacaagcaagaatagctttaatttgtgatgttgttgggggtggaagaagaactccctagtacatacagtagtacatatgttaaacggctaagattagatctacaagaaaagattgaattaacggtttagattaaattggggtaacttaggtatttaaaaattcaggggtaaatatgtaagttgaaaggtctgacttagtcaaagaaggttgactattttttttaacggagtcaaattgttaaataggtggaaaaaacaaattttagattagtgggatgtattggctaaacgtgacacaaaaagggggtgtatcggcaaattgaccctatcaataatgataactctttggtctttcccacaataatagagaccataagaagaatcttacattggttggaatctttgcctcccattggaggttggtacttgttttgatctttcaagagagttgcatacatatatttgatagttaaaactaatcaaggatgcattatttgatttcaggtggtgtttgctgctacagttaca

SEQ ID NO: 14312 - DNA, 2859 bp, Aquilegia coerulea
  Intron number 1 from transcript AcoGoldSmith_v1.010565m (l ocus AcoGoldSmith_v1.010565m.g) derived from phytozome v7. 0 (chr-ID scaffold_6; pos 2822606 to 2825464 reverse stran d)
atctctcgtcggggaaaataaaaattaaaaataaggtcagttacataaaccctagtttcaaaaaccagttcattccattatttcattattctcatgaattaagttattaataattgttaaaattttagcaatttatatcttatcatttgtcgaatctgattttgatttctttagaattttattattgcatgaaatttcttcttggaaatttgagaaatttatttatattttgcaattgatacaagtatatataatgttacatagtcatttattggattggatatcgttgtaaggtgtattgaaaagtcaggaaatttttagattagaaggtatataaatgttcttctaatgtgacagccctaccttgattgcatcttaatatacaatcctaatttcttatatgattaatctttatgttaagattatactaatctttttactagaacaagttacgaacaacgtaatggaattagcttagataagaaacaatagaatccaaatacgaatatgttagtaatactagcattgtatacacgtctagaagaaaattacccaactgaattgaactttcaatgacccatttagttttgagtatgtactatgtaactgaatttccttaacacacataaagccatctaaaatgtaaatttccctaaattaagtccagtgctgtagtagaaactgttttcaagtagaaattaacagatcgaaggacaatgagtttgtatttttatgtaattcaaattgccacaacaaaggtgagtgttctcaatttttggttttgctctaattggtgaagaaaatcagtgtattgagttagaaaaaccattcgaacagtttagtttattgagttaagcttcagtggttgcactcatcaccataagttttggcgtgttttttccactttagcaagctgtcctgtccattgtctcctttcatataaaatatccactttcagcaacaagtgatgaggtgaatgaatgaaagggagaacagagtgcttaaatcgaactactggaactcataaaatacaaaacatgaaccctaaaagccattaaaacatctccaacaaacacatctatgttcaatggaatcaaagcccctataagaaaatctgatcgatctcaaatcttttttgagctattgtggcaagagggaaaaccgatttttttttttatttgaaagccaaatcttgcaatgaccgtattatctggcatagttgcatagaaaattggcacaaaaaaagaaagaaatgccattactgctgtatggagaaaagctaggctcttttctgtgttaaagtgtcaatttcgccttgaaaggctcttgttgcttggagccaagagttggtgagagacattgtgttgctaggaacagcaacagaagtcataaagtcaatggttggatatgtccatcacactgaatactagacacataagcacaaatttgttgatctgaaaaagatttgggattaatcaaaggacttgccagatgcacccgactgtgcaaaaatgccctgaaggtgagcatatatgctgagtggagaaattgcttcacccctgatctcatagggattgaagcaaaaccatctccttactagcaaaaggagaagcacgtgatggtgattggagtttggaggccatctgctcctcagacatattgatttttactttcaaaaaatttacttcgatatcttcttacttgcgtcacctaacttttcatctccttatgtgggaacttctctttctctggtcgtatcgctgtcttgaatacggtaccaccttgttagatatcagttgtaatcgatgttcttactctattgatttatcgtcatggaaaactggcgatggttgggactgtctatctgaatgccatggtatctttactaccttcaacagttcaacatctctaattgcgataattccaaacagaaattacagctcgatacaagaagacttgcaattccgcaatgccttaaatctagtcatttcttgagatatgggaaaagatggaaactgaaggatgagattggcaaaaacaacatttttttttttttgcaaactagaagatgtgttgagacctagatagattgaactatggatatttacctgaaaatgatatgttgattccacttttgtaacaccttatagattcttttgtttgggattaaatccatttaaagctttttaattctttgaatctgttcaacaattatgctactgccatctcgttatgaaaaaaatgtatctgtaggagtggagttgcttatctaacaaataagattgaataactaagaggacaactaacggactcctaataccagtacgttgttaagatggtttggatattagaaatatttcttctctctttctgtttcatctatttcttttcaatcggtttggatagaattttcactagctccagtaatgacgagtgaatggttgaatatgaatagtaaggatcttcttctcagaatgatattagaaacgagacatgcgtgaaaatatagtgaaattctgttcttgtgatcaagcttcgttgtgggttgaatagagtatatgcaatacacactttctatacttacattttttttctgggtactggtaattgcaacatgtacaagctacaaagtacaggaagcactgtagttgaaggaattgttgtttttgagctgaaaacccactgttgtggattttgactattcattatcgggaagagatggttttgtttgttggaatgggcattgttgtagtgttgggttttggtatttttcaatttgaagcaaaaagtaatggagattggatgtatgattgtatgttgacagggaggtagcagcattggtttatctgtggtggcaga

SEQ ID NO: 14313 - DNA, 141 bp, Aquilegia coerulea
  Intron number 15 from transcript AcoGoldSmith_v1.000881m ( locus AcoGoldSmith_v1.000881m.g) derived from phytozome v7 .0 (chr-ID scaffold_20; pos 1556092 to 1556232 reverse str and)
gtagctgtactagggtttttaaggtacagaagaacgggaacagtgtgttgtgagctataaattatacataagcattctgtagattttgatttatttttatttttattgtattatgaattatagcaaggtggaacgacccaa

SEQ ID NO: 14314 - DNA, 1485 bp, Aquilegia coerulea
  Intron number 1 from transcript AcoGoldSmith_v1.008747m (l ocus AcoGoldSmith_v1.008747m.g) derived from phytozome v7. 0 (chr-ID scaffold_25; pos 819494 to 820978 reverse strand )
attttcgtaattacacctttctttataatctcaggttttgagtatttgggggtattctgtctactttatcagtttattgctttgcttgctactatttgagtaattgtatttggtttgttattatagcacacacagcttcaatccccacaatttattactgcatgcttcaaacttttcttcatccgagttgttaggagctagctaggactaggacagaatgatattataagcgcaaataacagtctgcgagaacaagccaacattcaaaattaaaattgattaggtaccgttaaatttattcaaaaggaagtacaatattttcgctctttaggattatcaccatgtccgttccaaatccaagatttattagtgcctcagatgatggtgttggattggtgacagtttcacgaaaatgaaatggttgcattttatactaccaattcaaaatgtagtgagaaagagagggtcggggtggggacatagaataggaaatcaaaatgcaattaccggttttcttgcgaggtattatgtcacgtatgtgacaaacagatagaatagcttccccacaccagttcaaaggagcgcttaaccttgtaatatttgaaaattgcattttcttatcactctctttggtcatagtaagtttcaatagttgactcccttaagctaagttagatactgctctagtattgtgaaagaggacaattataggaggatctagtcagtaaggatctatcttgttagatttttcatgtgacacagcgttcctagcctcctaggtccttagtcctcaacactttattcctattcctaattttccttgcaccggtaagttaagagtcagtggttcttccacagattgcttttctttgttgtttttcggctatggagcctatatggactatcgagagttttattaagagaaataggattgtagttaactgttgcctgttttctgtatcagttggtgaatcaattactcactccattttcttttagtgtgccttgggtaatgccaggttcagtgacagatctattagcatcatataaagagagtgtattcagggcagttggttgtgatgtattgttccatttgtaatattacaggggatctgactgttcagaaaaattaactaagcatgttggctcactgggtttggtgatcttattaattattatggttatcaaaggatcactattcctatggccaaaattgtagaaaagcttaagaagatttgggtttagcattttgttatatgggagtctcttgtttttgagtatgggtgattgtttttttcccttgcaatgtcattttgcttgtaacataggttacttcaacatactttaattttgctcttctttaataaatagtcttgtaatgaagcctacgtcaatattttgcaggctctcaggttctcttcacctcttgttgagcaaaaagttatgtctaaacatactttaatgacttttcaggtacgctcacgg

SEQ ID NO: 14315 - DNA, 1495 bp, Aquilegia coerulea
  Intron number 13 from transcript AcoGoldSmith_v1.002079m ( locus AcoGoldSmith_v1.002079m.g) derived from phytozome v7 .0 (chr-ID scaffold_76; pos 775212 to 776706)
gcgtgccagtgggaattggggtgagctcttcaataagcttgtttaactttttctaagtgttggtcttgctttatttattagaatatttaaatcataagtttgtcgttaccattacaagtgccactatggtgccaacagggaggttaccccgacacattactatgatatctaattttttatcaattcaatatgcggtgctggtataactctataactgcatttgtattacatacgatttccatgaatattttcacctaagtatcaaattttatacaatcattaatataaccttatttattaatatttcgattttctgtaattggtagatatgatgttttgtttacatagccatgtaaatccacgtagcattgcgacaaagtttgacttctcaatatacgctccctaaatctaagtctgtatatgaaactattttctagacgctcaatttgcacatcagattgtggtattatttggatcattttctgtattgaatgatatcagattgtggtattatgttcagttaagatccttaagcagctagcataaaatttatactctgaagaatatatgtttccaatcatttattttctggcaccttataactttcctaattattttttcaagataacagaaaatttccccttacaagttatgtcttctttgttgtttttattttaaattttccatagcatatagtcttaagtgcataattggaaaggtcctgtgggagctaaaataacttctttttctttagtaatgtcttcttttagtgcaatttatatcaacgcaacttgtaacctgtgatcccaatttatatgacacatttcgaaggtcttctggggtttttaggaaaaaaaaaaacagattgctatgaaagtattattgcctgaaaactttttcctaaattatgaaacgacatttgtgtttcgatagaaacaaaccttgattgtgatatatgtactctttctatgccgcttctcctagatagccgtgtagcataggcgtttatttatcctattagtcacagttcgttgtaggtactttgatgttgaagtatatgaacatttgaagaataattatatgatatcattaattttgtttttttgtgtatacattttaaatggtaactaatttgttctttatttcatttggagtgtaaactattatcttaagattaaactaaaattgagaaacacaagttacacacatttttttccacttgtggatatactattgaaccagttagtactcagttaagagtccgagtattattagttatgatgtgattaagtagtttgaaatgtgtttctgtgattttatgttttgcaaaaagatacataggttgcttggggatcatagatatctatacataagtctgtgtgaagtttagttttttaatgatgaaaagtgtttcttagaatgcagtggtcaagtttattaatgtgtagatctattattgttctctatttgtgacttctacagcttgaaccctctt

SEQ ID NO: 14316 - DNA, 463 bp, Aquilegia coerulea
  Intron number 1 from transcript AcoGoldSmith_v1.013172m (l ocus AcoGoldSmith_v1.013172m.g) derived from phytozome v7. 0 (chr-ID scaffold_164; pos 47656 to 48118)
aagcggaaaaagttcaacttttggacattattttaagcgattagagaaggagttaggatcttaaatacatgaatttattttttggatttcgattagtatgtttttgagattagaaaaaactaataaataaataaaactcgtattagtatgtgttcgaattcaatatgttttggtattttaattagtatgaattttgatgattatatactgttggaattttgtttagatggtttggaagttatatttgttttccccttattattctttgattttattcctattttaaagtgttcttgtatgttttagaacaaagatatttgcattacatttatttgtagattcatattaatttaatttttttttatcttttcttggtttttagttataatgacaccgaagcaatggttgttggtaagactagtggcattaattattttgcttaagcttaggactccttgtagaa

SEQ ID NO: 14317 - DNA, 2866 bp, Aquilegia coerulea
  Intron number 2 from transcript AcoGoldSmith_v1.011658m (l ocus AcoGoldSmith_v1.011658m.g) derived from phytozome v7. 0 (chr-ID scaffold_25; pos 1586480 to 1589345 reverse stra nd)
caaaggtggtgaacagggttgggctgcacaaccaagtaagtttctgtttttttttaaaccccctttaaaccctaatccctaattttttttttttttttagaatctgtttggttagtaatttggtaggcgatttttttttttttttaataaatttttttaataaattttttttcttaattgaaaacacgaattatcaagtttcacaattgatgagttcttttaaggattaataatgggtatgttgcaaattagtaagagtgaattattactcgataaatcattaatgcattttagatggcatatacgtagttagaaactccaattgcaatcataccatgatattttaggagaaataaagatacatggtttcaggccttagctccattgatggcataaacaagatttgaacaaaaatacattctacgagaatccaaatgtctttggattctatttgaagaatatggggccttatgcggtgatataaatcatttttgttgggaaaaccaaagtgattttattcttagttggtggtttgacctaataagctacctgagtgtttgtaaactacatacttggatatagttttcaaatatacttaaaaagcggttggattaggaaaggcattttcacaccttattcattgtcctggtggtactggtctcctttgttttttttatagactctagaaggctgagttagaaaccagtcaaaccacatatctcaatagattttattgatgttagggcagggcaggcccaggaacttgtaggaggaagtgtgtacatgctaaaacatataggattgtaataaacttcattgaagctagttttggaagtttgttttggcaccttcattctttgtcctggtacagacttcctgtttatttgtattgaaaacattagaaggctgaagtaggaatgtaggatacatcatggtgttagcctggtggggatgagaatgttgaatttaggtaagattttgattcattcagtaaagactttctctgtcacctacttggcctcctgttggtagagtctctacctttggaagcttatttgcaaatctgtgatcctacattctgactaatgagtcattagtgctgagaggtttgaactttgaacacaagtctgtggcctaaaatttggagtatcttttaaaaggagggtatgataattttgaaataaggatatgaacaaggatgctatctgtaaggaggtgaaatataccatttggtattggtgttctagttggaaaagaagaaagaaatacaggttcagcgatcttatggataattgggatgcagtcatcaaagggtggattgtaccatcgacagattagtctctagtttcttcttggtgtatggggttttatggaagggtttagagtgttcttgctctgtacgttttattttaaatcctaacctgacaatgcttttggcatggtgctcaggatgtattttttttttttttttttctttcttttcaataaattttaacttatcaaaaaaaaaaaaatgataattttgaaataatttgtatgaactcccctaatctgaactatgtatatgtttatggcctttcatgattttggtcatgattcatgcaacttctcttcttcggtcaaacagataattgtccatcactaaaacttttagttggggagtatttgaattaatgaaacagtattgatagttattggcacatcagtatttgtcattagtgagatttccttgattaaaatggttgtgaagttatatcgtctagcttatatttaatatggaactaagtattatagcttggcatggttcaaggtcttagacttgggaagtaacggggtcagcattttttcatgggcttggcatgattatttgaactaagtattttgattttagtgtcagcaaagggtatataatatttgggaggttgtttgggtaggtaagatgcagagtccctgttcttattacatctcattgagtataagtggagcgttatgaactttgattcagttttaaatattttaattataagggttgatgcttgatcactttattgaaagtaaatggttcttacttcttggttactttatttattagaaagaattggtcctagctactctattaggaagaattagtccccttcacaaatttgaacatcgtggatgtttgcaagtttgtgcacacaattgaaaggttcaaatcaaatcagaacatggtatgaactctgaagacctgttttatatctcatttttgcgttcccatcccttaacaacatcctattactattccttttggtgtgtagaccttcacaggattctgatgattgcaaaatcgtctgtctttctcagaaatcaaatttatacagtttttgtttcctttggttgtttgtgggaaagagggattacattatgtgggcttcccttttcatttatttcagtatatcaatatttaatgattaatctgattattgagcttaaattttgtttttattatatattgatggttaggcttacagccttcattctgtgtatcaaattgaccccattcagggtctagtggtaactttcttgtcattgaagttgagtcattgacctaaagtttgtaactattttctaagaaataatagacttcaagtgcttactttttgtggcaagtaaataatggttcagacactttcttagaagattgcttttgttaaatggttccttcctttactttgatgtggtgtttatgttatattctgggcttcctgttcttttttatgcattgggggcttaagtctagtgctttgacatcaccttgtaattttgctttcttattcgatggaggttttaacttatatttttggcttgtgatttttagtttgggcgg

SEQ ID NO: 14318 - DNA, 2144 bp, Aquilegia coerulea
  Intron number 3 from transcript AcoGoldSmith_v1.026042m (l ocus AcoGoldSmith_v1.026042m.g) derived from phytozome v7. 0 (chr-ID scaffold_36; pos 763878 to 766021 reverse strand )
ctctgataaactaataaacgagcaacttatttgtaatgttgacaaaccaagtttttttaggttcaaaagctacgtcaatgactaaaaaacctgcaacattcacatttttttttctagacaagtaatctccaagaataatatcaactcaaaagcaataaattagagatgaaaaacacaacacgttcatggttcgccatatacctatttcacggggcaggatgaagggtgccgctagtcgaaaaaaagagagattcaatgagcactcacttgcactcaacaacttaacacttacgagtgacatctcacttgtacaactctccagaagactctcaagaaaactctcttatttctctattcttgtccctctcagaaaaatctctcttttggcgatgaacatattagcttcaaaccaggactcaaggactacaaagagaaccctaaaactcattggatttttattttagccaatacaagtattcagccttttctggctcgatccgtcctaaccacaacataggcacgttcgaacctatctcaatggaatctggcaacatctgaacatgttctggacccctgaattctcttttgtgatctgacaatattcaaacatgtttttggacattgaaccaaaatcagagcggtccctgacaaccatgcatatctaacagcttctgaaccaaatgcgtagaaaactgaatattaaccttcaggtaaaatattatgatcatttgctctttttgtgccagttgggctctgttggttatttggattatgaaactagaggcgggattagttagagtgggagttctccaaattgatttgggcagtgcaagtgagactcatggacttattgtatctccaggactgggccatttgttaattattgtgaaatgatcgtactgtcctacttatttgggcttagggacttagggtctgaggaagaatgagtggaattttgaaggatacccagttctgaagacactagtgtagtgaatagccgtccattgcagtgtcacacctctctgtgctcatactgtactccctcctctatgtataaaagtttcttggttcgatgcagtgctacagttatcctccggttgctattagacacacttgcactctccttgaccttgttctctctatattcatttgcatccaaacattgttgtcaaaagttatctggcaagatagggaatgtacatatatgttacatttgtggttgctcttctggtgaaaccgcgcaggtcaagcttatggagaaagccacaatagagaccagtgcactagagcatggcatatacacctacagtaacatcattctgagtgcagatcgacatacaacaaaacatcaactcctacactacttcaatatgctcgggttagctagagctggataaatgacttcaccatgtaatggtttactgctttaaaccaatttactcattctcaggtcttaatggacagaagaacgtacagctatgtacaatactcgaagggaccggggtgtagcatagggcagcttgacggcacatacctagcggacgccccgggggcaatcacacatcacaaagaccctcggtccaatatggaaaattttaatgggaaaaaatttcaaaatcggactaaaaagcaagttgaactctaagatagatcgaataggggaacaagcttgaaatgatttcaatcttgtaggcactatgaagacatgttcagcctaattacatcattcttagtctgctccttattaattgaaaacatccctaaatcaagccacagaatttcttttcatccttttcttatcgatccatagccttaaacaatagctcttagtgtgtgtggttgtaccgtcacaacatacacatcatctcagctttgttaattgtaactggtctagtggcctggtagcactcagttgttgctaaatttcaaattgtgactattatgatcaagtacctttcctcttaatacataatcgatctcatattcacacacataaaaacttcaccatcctattcttttattttgaatagcaaatatgataatttttggaccttataaccagagtcttgatcttgatagtactacatagaagttagaacaatctaattatagtgaacatttaaattttgcaggagtaagcaaag

SEQ ID NO: 14319 - DNA, 767 bp, Aquilegia coerulea
  Intron number 1 from transcript AcoGoldSmith_v1.001962m (l ocus AcoGoldSmith_v1.001962m.g) derived from phytozome v7. 0 (chr-ID scaffold_36; pos 771476 to 772242 reverse strand )
aacccaatcaacactgtttttggtgagttttttccatcttctatgtatagatctgttgagtttattgtttattgtcgtagatctatgttgttaatcattaaacttaaattgaagttctgaagttgaattatagatttgttttacttaattttatctatttcaaagtgtttagtggactttaatgtgttgaattagcttgttttgttatataaactttacagcatgcttttgttaatggttattggtgttttaagaatctatcaggatagaaattttaattttgaactagattttgtttctctctagctttgcatacaagtaaaatttgtatctttagtaaccggagaattcaattattgtttgtaaagtactttttatttttctatggatataaatcagctgtaattgataagaattttgttttgcaattctcaatgagggggttagaatctaaaattgaaccattagatgtagtcgtttcaggttttacttatgcgactactatgctctttgtatagtatctgtgacttgattttttaaaatttgaaatcttaggtaaactggttaacatttttaagactttattataatgaatttggatatagtagctactccaaaacaaaacctggaacttggtgtacatcattatttatttatttgactctagtgtggttttgtttgaactctatgtttgtttctattgttttatttcgataacattagggatctggtgtaataatattttattttttttattaactcttcag

SEQ ID NO: 14320 - DNA, 971 bp, Aquilegia coerulea
  Intron number 7 from transcript AcoGoldSmith_v1.018787m (l ocus AcoGoldSmith_v1.018787m.g) derived from phytozome v7. 0 (chr-ID scaffold_2; pos 3977409 to 3978379)
acaactggagttctaggctcctttggaaacaagtcgtaagttctctcaccaattaccattactaagtggcgagttcacaatttcaggtttgatcacatttaatatataaaaatcacttaaaatgtctgacatggccagctttttgtgataccttcttgtttcatttcgaatctaaaacatactcaggctagaaatccaatttaaatacagaatttcattgcacccaactgtttgtcattgctaactaagatgggtattatcttgtagtgatcagttatctatacacatctcattgctaacagctgtaatcgtgtacggttgttatggtgttattacagctcacaatacatatttccagcttgccttaatacacttttcattgaaaaactggaagaacaaaaccctaaactgaaatatcccaaatgaaaatggagccgtatatttgtacttgaaaattgaaagcgtctgtaaagttgttgctgcatagaattctgtaatatagccattctggggtattaatgtttcttatatgtaggaatataggatagactgatgtactgtggtttgtagtttacaaaaagttgtgatggaggacctaacaatcggattatttgaacaaattagacaatccaaaataatggcagtaggatccagaacatgtctccaatcatgattattgggttagaggagcacctaagtggattacacagatgagagatgggagtgtaggactgacttatgatgactacgtgatgcatttatgcaatacccaacagtataatggtatttgtgtttacatatatgtcttgttaggttgtgaaaattgattaatcatttgtgttttggattgatgaatgatgagtgatttgttaggttgtgaaaaatgaaaaaactatctaggtttgccctgttttgaacattttcctatctacgcaggtttgtgggcaacttagacctctgtggcctgcaaa

SEQ ID NO: 14321 - DNA, 1203 bp, Aquilegia coerulea
  Intron number 2 from transcript AcoGoldSmith_v1.005519m (l ocus AcoGoldSmith_v1.005526m.g) derived from phytozome v7. 0 (chr-ID scaffold_35; pos 1781211 to 1782413 reverse stra nd)
cctacttatgtgagtcccttctctcgggaaatatttgccattttagtatgctgaacaatattgataaagtagagcgattcatcgtccagaagtcataaaatatgtatgtgttataatcttctttgtttgaaatctttcctggatcctttctcggtgagctgtcaagcgtatgtgttttgatgggttaattgaccttaaacgttttcttctccaccaagacagttttcgtactatgattacaaggggatattttgttttcaagtatgacattgcaaaataattattacgttgaatcagctctgtttcttttttccttccgtggagacttttgtgaatgattcgttttttatttgatctcgtagttaacattacagctttggtagagtagttgattatctcttggatttatgcacacaagctatatactctgccaatagcagatgtgctcacatatgaagtaattgtgcatcataaggtacagttgtaggcttgtagctacaactgtttccatagctccaggagtttctgtttaaataatgcattttaatgtaatgttctttaccgtgtgcgtttggaccaaacttgtgtttctagtaggattagaattactgctgtaggtagttgtactttgtagcttctagttaaaaatgaaaaacttgctgaaataataaatattgttcaatggtgaaaactgaaaagagtactcatatgtacaccgtcatgtgtatttatgatggatgttttatttgttcttatgagtggagttctttttctggtaggcaagattaatgcaaatcttgtgaaattgagaaaatcgaaatataagtgctgacgtgaaaaaacaatctattgtggaaaggctgcccccatgttttgacttaattggttctgaattggacagtaaagcttctattctgccaagtttatcttatcaatttcttcttcttaaagctatggccaagttggtgtaattgattaaaactacaatgcaaaagaaagtgtaattgaaaaacctaaccttactgtaaatgttaagggtctcaatgattggtttataaatgtagtttttggatgtgccaaattgtccttatgatatgcaaagcgttttgagttatttttgaaattgtttgaataacgactgttcttttgtcgcatgtgtatattttagctgggcaagtggagctcttgatccagagaatagtt

SEQ ID NO: 14322 - DNA, 485 bp, Aquilegia coerulea
  Intron number 1 from transcript AcoGoldSmith_v1.013320m (l ocus AcoGoldSmith_v1.013320m.g) derived from phytozome v7. 0 (chr-ID scaffold_26; pos 3843 to 4327)
ttcggatatacctcctagggtgagtttcaaaatgcaatttcatgtattggcttcctggcctctaaggctctaatcaagtggtggtgtctcgtgtttgcatttggtgattttaatatcaaatttccaattgatgtgaagcttcattagttttacagaataatactaacatctaaaccatcaattcatatattctcaaaatgacagattagagcatgcacatatgctttcttttgcacaacaagatggttaacagcaactgattacagttctgtttgcgattcccagttgaataagaagtgaccaattagttatattttgatttgacctctttaatttacacaaatatgcacatatacactctcacataaacgcgcatttatgtatttgatcctttgattattcgtagctttttgtttctcatgtatcttctaacatgaagattctgtgcagattgaaaatattcgtacctattacggtacttgctt

SEQ ID NO: 14323 - DNA, 748 bp, Aquilegia coerulea
  Intron number 4 from transcript AcoGoldSmith_v1.004477m (l ocus AcoGoldSmith_v1.004477m.g) derived from phytozome v7. 0 (chr-ID scaffold_2; pos 8226632 to 8227379)
gcgtttgaaatactcattctgattgacaatttcaggtactttcttttcaattaatttcaagatgatgtttttacatgtacagatattcattttttttttttctcatggtccttgaaattatactgtatgtatcatgacttgctgctactttgttctccaattttttttttgaggagcgggactgtttaatgtcagaaaggaatatatgctctgctagctattttatttaggaagtttatagaacattgaattcgtgtaagtacagtcgatgatcctgcggataatgctgcattcctcaatatctgatttagattttattcttatttctttagttttttcagcattggttgggacatctccaattctccaccccaccccaccccaccccaccccacccccactacacatacatacccaaaaaaattaaacataaataatagaatcttaagaatcaactcacaaagttgatgagtgttgtagtcctggttaaagttggtgcttttatatggattttcatgaacagaaacaagtattcctttttagcgaagaggaagatgttagtagttgttttattgctgctattgtaatgtagattatttctactaattaaatgctaggaacctatcgttatttagaaaaccttagatggcaggttttgttgtgttaaatattcttggttggtatgttgttatcaatcagtttccattgtatactttagtcatttcaaagccctttccttgtatgcagg

SEQ ID NO: 14324 - DNA, 966 bp, Aquilegia coerulea
  Intron number 6 from transcript AcoGoldSmith_v1.009337m (l ocus AcoGoldSmith_v1.006875m.g) derived from phytozome v7. 0 (chr-ID scaffold_17; pos 3784762 to 3785727 reverse stra nd)
caggtatatattttgatgatttgtgaaatatatatttgcatatctcaataatctctaatctcttacataaatgcttaagcctatctgtacctacatagaataaatatgttatactgttatatctgtctctggttgattttgactgtggagtggaaagagggtaccctccctctgactgatgccgttttagggggctaagctcacgatcttgaattgaatcacaccttcacctctgataactaaccacttaatgggggaaaataaactgtgaagaggaagagaaactctgaaccaatacaaaagaccattttctcaagactgatgaagcttcgaacccttgcaagtttgtgtttcgaaagatgtcaactgcatggtgataactacacacgttagtgtaggatagcagtcgaatctcaaccaactcaactgattaaaaagattttttactataaaagaagcactttataactacattccttgtattgaagtgcaactactataatgactatgctaaaacaaaaggtgtgaattgaaaatgaaatgacacacgtaattttgaacaagttattatattatataaatgcactgaacccaaagaaaagtaagatgactatgcactttgtgtttctaccatatatttttatctatatatatatttgcggaactcgtcatgtactatggttgtttataaatgtgaagttaatatcagtagacattagatactcttaataaagggtctttagtgaaaagctttgtctactaacgtgaaagaatgagttcttatattaaaccactggaagttactctgctgctttttttaatttctattttccttccatgaaaactagatgtaataatgcttttaatatgtgtaggacctgtgttactatttacttataggttatttcctcatattgctcacatacatctgttctccttatgcagttttgtgtttctgtttattcc

SEQ ID NO: 14325 - DNA, 2546 bp, Aquilegia coerulea
  Intron number 1 from transcript AcoGoldSmith_v1.016432m (l ocus AcoGoldSmith_v1.016432m.g) derived from phytozome v7. 0 (chr-ID scaffold_18; pos 2981715 to 2984260)
ctctttgcctcattagtctttctgatttacaagaggtaaagtttttttattattaataacttgttgttttttatgtttcttttatacctaagcacatgagttaatcaactttcgccaacaattagatatacttattgtggaatagctttaataaatgcagttttattaatatctgtattgcgttatatgcttaaccacaacaagattttatgcatgatatatgattaaactacatgaagaagaatgtattaattaatgaagactaggggatacgaaacttattatttgcacatcaaatgtctaatgttaagggagatttctcaagtggaaggctttctttccaagtttctcttgtgagtatgatacaggatatcttgatattggaaaacaacatatacaagtacaggaaaaacagtctacaaaagaaagtctgctggctagaaatcctgctattgcacgatagataacaacaatgtaggccccagatgccactccacctcaacaatatcacttcctttttcccttataacacaggatgaaatattggatcgcatctactgaaaagtgatgcaaaatttttgagtagggattataagaacacacttatttacattgtattagtaggttcaaagatagaagtggaggcgaaggtagggttcaccctactccatttcacagcaatatacagtacagtaaagtaagatgaggaaagtaagaggcatcaagctcaaagtcagttagggtattgtcatactgagtactagactatcccattgaaagatgagtccatcaaactcaaattcttcctttcgttgtgattgagttaccagtccagagaattaaagcatctaaaagaacatgtctctcctaaaaaaggatgcacttcgactcttcaagcactcctgacaggcagacaatggcaaagggaagtaggcctcaacagcgacccagatgtctttgaactacatttagctagtgagaaagcaccacattaccacaacaacctctgatcctcccctagattgcacataactgcttctgaccttgacaaaattcccccaaacttgttttaccacaggacaactaagaaggtgatgattaagtgtctcaagggacagtttgcggagcttgcaatactcagaaagtccagaaagttgagattttgaatcctgccctatgctatactccataagaagcatttggcctagtattgagtttaagttgtctaaagagcaggtgccagttgagctcaactggtaaaacctttcggtgatgataccagaggtctggggttcgaatcccgccagcattactgagttactgatctcattaaagacaggcttaccacaatatttttttaacaaccccgcttgcctacccccaaaaaaaaagttgtctaaagatttaacttcgatgatttatgaacaccagaaagtgcacagtactgtccgtgaatctctcaaattacagtaaagcatatattaaaatgataacattagagcaacaggttatctgcaaataagtgtaggggttatctcaacgaagcggttcaagaaattatcacagaacagaaatcccattctcccgagacaaagtcttgaagacaaacataataaaatcaaagaaacaacaaagaaagataaaagaacatacacacacacaacacaaagttttacattaataacccctaaagagggttaaaagttaaaaccatgggcatgcacagcgatccacttgtaatttaaaagagagttacaaacaatggtcactcacacctcacacaactaaaaatattatacaaactcacactcaccattagaatagcataagaagccccatttgatgtacaagagatacccgagatcactcaagatttcatgtttgacgtcataaagttgagttctcgcttcttccatgtcacacttcaagcacccttgtagactttaagattcctccagcctcatggagcttcttcacgttctcaaaatgtattctgacatcccttatatagaaatcctaacttggaaaccaaaagaaatgattaagagcacaattcttatttatctcaagatctttgtacaaatgagcaacaattttgattggaagggcgaacacagattatagagactagctctccccttaatttgttcgaataggagaacattcatgcggatgaccaaggccgtcgcttggatgaggcctacctgggattgtagaataaaagtcaatgatatcgactctaagatattttatgatatagatgatcatcattgtcattttgtcccccatatctattttttgattggtcatgaagttgcttatatgcatcggattgaacagcatcagataatcacttctattttcgtgttggttgtgtgatctttaggcttcttctgcttaaatttaattagtttgtatcttcatttgtctatgtatgtagtaactttcttttctgttgttaatattactgtattcaattctgaaatactaaattctattagcccgacacagaatagagtgacaaagaagatccacctagatccatt

SEQ ID NO: 14326 - DNA, 3716 bp, Aquilegia coerulea
  Intron number 1 from transcript AcoGoldSmith_v1.005644m (l ocus AcoGoldSmith_v1.005644m.g) derived from phytozome v7. 0 (chr-ID scaffold_35; pos 307479 to 311194 reverse strand )
aaagtctggattgagcattgtaggtattgctctttaaattaaaggttttgacctagtttgcatttctgttgtagttaatttgtaggtattagtttaatcaccatcaccaaacatacattgctctttaattttaatattttgacctgtttttgcatttctgttgctgtcctttttgagttgttagtttgatcaccatataatcagttggaaggtgctgagctttactctttaacatctattgcaagttaaaggaaacctatatgcttgtattatctcgttcttgcacaagaatgacaaaattaacttgttatggcatgagttattatactcgttacagtgatggtcttgatacgtcgatatttcactatacgtacaacgtttcacatccacaagatacagtttggatatggattatctgttaataatttaatgacacttatggctgtgactatatatggatagttccatacgtatccacatcaacacatccgatcacttcaacaagatacaattttgatactgactttggatttcatggactgttatagatattaccatatttgtttggcatttatttacctcttaaatttcatgtgtcttgtcaacccaaatacttttttactttttttttcccgataataaaatactttactactgtagtcagtatcacaacacttttatttagaaatacagtgcaatgatttatctgtttttgggtcaggcatggataaaaacattagcagctacacatcttacttttcttcgcttcttttcccttgtcctgcatctctcatcatctcttatgtgaaacattgcattgtatcacactactatgattaagatgtgaatgaacttcataagaccctcttatgtagagggaggaaggagaagttaaagcaatataggatcatatttgatgtcgcttaccattgtctgtagtcatagccgtatcttactatctaggccctgcttgtttgggctgcaaaaaaggcaaatctttacccatctatagttagagtggtccctcccaagtttactctttgatttgaatggacccccacctattttagcttaaaccctattggtcccccacttaaaccttgcataaacatgagataatcataaatggtcccctactaagtttattagagaaaggtgtaaaatttttgcacttttgaaatagcaccaaacttttgcataaattttgttcataaaactaattatcaagagtttcaagcatattaaattaggctaaatttcatgcaaatttttgcggggtaaccaagcagggccttacttgcaaaattttatctgactgtggtatgcaattgcctgagttagaaaatccctattcttaaatgagatgctttatatttaacagttattaattcttcttaataggtatgtgtatatgctaaggtatcttgtcttagactttttatgatagtaggtgcttgcaccagagttctgaagcaaccaattcctaaacacaaaagccctatcgttaaatgaaatgctttctagtttagagtaattaattcttttgaatagatacttttgttcatagtggattgatcatgtgaatatttgtatgtgtgcaaaggtatcttggcatcttgccttagatgttgtttgtgtatagttacattactatatatttgcttgttacccctcagaataaataaataaccaagtcttaaacacataaacctaacaatctaacatggacccttttgctggtaagtggtaaccttaattgtcttgagatttgatgatcaaaattaaattttataccatggtttgaggcaacataactttgaccacagaaagcctcttcttgtgaatatcatccatgcctaggcttgaatgaaacaaatgtaaatgcaaacaactagttcaatatgccttggttatggtatcctctcataatttatggaaaaaaatgattaaaaagctgtggtctcgtaataacaataaaaacctattattacttcctttagagtatttgtttttttcagcaaaagggagcttcaattatcatccaagatttaattatactaacatttacactgcattcctcatattttgagtatttattagctcatctttttcgtttctcttaacaaaagatcttaatacttagagagcgatattttaaatacaatttagtatagaagtcgttatccataaaatgcggtctacttagaagttacatacgtgcatccattatctaaacataaagcattcagtagcttattaaattctaaagcttatccgtttatatttctaggttttaggagtggctcacttggtgaagattttctatatatgcatcatgggatttaggatatatctcactatttaataggagattccatatacgcattgtattatgggatttaggatctcatattttttcctttctacttttgacataagtatgagctgcagcttgctgctgaatatttaataagagttttgcatgtacctatatcaagaatgaaggtaggttctcttgagaatgtagtgtcaagtgtattaatagttgcacatgatggatttttaactcaataataacatgattcttcatgtattaggaaaaagattttcgcatagtacaaaaaataaatcgaaaccatcatctattgggcacagaatttttacatatataataatattatgtcaattctgtttctgtactgaaaatatggatacctacacactagcaattgttaaaaaattgatatacaattgactatatcataatgtagccatcatataacgcttctcaatctttagaaaattatgatcttggttagttgatatcatgtctctctgtgttttgctgttttctcggttgtttatttggtgccaggaatgaaactttatttctctttggaggggtatgaaatcatagatgagacataaatgatccatggtatgataatacgttgctttagagtatatagatcattatcacatgatttatgtaagagatctctttatgtaataatgatagttatgttgctctagataacgtaaaccacgatccatataaatactgagttcactttgcgaaactagtaacaatggaaccactgtagaacactagattttagatacttcttagagcgtagaatgaccctctatttggtgatgatgtatatgacatgcctcttttgatgttttggcggttgcttctttgttaattattaacatattagaactaggtaataaagttcttatttgtaggttgatacttgatatgtcctaaaatgaagaacggaaaaaacaaagcatgcaggaagaagggtagagctgatcaaatgccctgtttatttaaaattcaacacattataattgatgattttaggattctttggattgttttcttgctaattgtgctcgtttagtaaaatacttcattgtaattattaccaattaatagaagatggacaataattattggtcttttatttgcattatgatgtcctgcactgcacttatgcttgtgctggctgcttgtttctcgtacgtgtgcaattttgattgttttggctgctcaaagtctatagttccatcctgagtggatgaaaatatttattttcagagtttttaatccttataatattccgtagtttgtactatatacttcttcctgtagtcttatgtacgtgagtttttctccttttgtgttacaggagaagaccaactgc

SEQ ID NO: 14327 - DNA, 1759 bp, Aquilegia coerulea
  Intron number 2 from transcript AcoGoldSmith_v1.009358m (l ocus AcoGoldSmith_v1.007972m.g) derived from phytozome v7. 0 (chr-ID scaffold_24; pos 2873039 to 2874797 reverse stra nd)
gggaagagttgctatttgttagtagtaaggtaatgcaattatctttgtttttctcttcaccggtaaaaatgatctatttagaaatttgaagattttatttgtagtttttatgtatctttgttgagtttctctcttgacaccacatagtattatcttctctctatataatatatgtgaatttatataaacatgtttcgaggagagagctaggcaagaaatttcacttggtccagtaagctgggaattttcgctcttaccaattggattatcttttgtgaacaattaggaggagagctcttagctgctccatggaagaaacatctaatggatgtaatttcaacttttactgtaaggagagaatatgggaatggtaggagatggtgatgaaggggcagagttagtattaggtttgctagaatgctgcaatgtggaacaaaaagggtttgggaggctggagatgagggaaacagagtttttgaggttgacaacctgtaagtgatcatgtcatctgttttcaaaagaagataaacttgatttttagataaagcaaaaaattatttgccttcttggtttgtccgctgggatcgagtcagaagcttaagagtgagaggactaagaatccaaaattgagtttgtttgctgagaggatgatctgattataaaatcctcatcacacatctagagccaaccaattatgcaaagagggaattactttggtaagcctttagtttttattggtggtaatgagatttgggaggaggatcctctgacagggaatcactttggtaatcttttataatttattagtgctattgttttatttaaatcttttacaccatctgatgactttctacttaagaacatgtaagctgaagttacttctcgtataggtaaaaattgacgaagatgtcttggtgattttttcgggtgcttatttttgtcaaaatgcatctaggttctaagaaggaaatgcttttaagtttatcagttgtcaatatttagatttggataatttgttttccgtaattaatgttgcaaaagccattccacgttatttggaaatctgtgcttcgtgttgcacagaggattttttgttcaatgacaacttatataagcatgattgaagagtatatgcaaagttcattgtacaattatatattgattattgaatttactcttttgaagagaaaatgtttgattcacatatactttgttggatccttattattgcttctgtgacaacgctgcctagttgctctgacatacaaggcagaagcaaatgactaacatgttctatattcctttttcaattgttatttcataatttgagagggaaatgcatagatgcctcgctctagcaatctagcttgagaattttgtttgtttgcacacaagattgcctagttgtgcttttgtttgcacaagaggcctgccatccgatgtgcaaatcctttttataatttcatgaattgtaatatatgggccatttcacaaaagcattcatcattgttagggcaccttagagaattatattgtctttcatcataatggtaagacaacttgtgaaatacaaatttatcttaatatgacatgcccaaatggattattaaacataacgtggttgtaagatgatatattgttgttagaatatgcgagacttatatacttgtcgctgtttcctgactgactgtattctttggaaattttgtttatccattgtgtaggctggtttcgagcctacaaaaaccaattccctgtt

SEQ ID NO: 14328 - DNA, 2643 bp, Aquilegia coerulea
  Intron number 1 from transcript AcoGoldSmith_v1.010467m (l ocus AcoGoldSmith_v1.010445m.g) derived from phytozome v7. 0 (chr-ID scaffold_3; pos 4982021 to 4984663 reverse stran d)
ctcgaaagtgaattgaaaagaaggaaagtttaaaggtgagatttttaacttttgaattactttttttcgtcttcttgttttgaatttctaagaattgaaagttttaatcagtttaatgtttagtgtagaattgtgattttacatgcattttgattcaatttggactgatttgactccaaatctattgattttgactaaatagtattagtcaaggtttctcttttatttgttcttgtgagtttgtgatattgattgatctgggattgaagtgatttggttatataaattcaaaattgatttaatttagattaaatttctgattaatttcatgaaatgaatctggggggcaatagttgcgtaattgatagaactgaaatgatagtttgttggttcaaactgtaattgtattagagaaatctatgccttattgatttacgagataggggattgcagtcaaacattttgtatcgtgacatagacattaatttggatcttaaaaacagttcccttgtgatgaacgagctcgagacaagctaaaactggacaattttttttttaaaaggtctatagtttgtatatttctggccatagtttcacggttagattgtatggttattggggtaggtagcacagtagtaattacctgattacaatttacaattagtatgattctattctgtatgcaaaatcaagtacgtacttggttataagttattatgctgcaaagggggaagtttttagacatgaaagttggaattcataacgatcagaccattttttgctacaaatttgttaggaacttgacaacaatgtaagctggtgtgagcctctctctttaaaagtttcctatattcaatgattcctgcaccatctacatttgactgtcttaaccacctttatctgataaactaccaacttgaaaccttaaatctctatatatagttaatatatcatcattcctttggttgaactgtataatcttaaggactgaagtctagggctgtgcatggtctggttcgtgttggtttggggtttaaacttgaactgaacccaaattattagtcttatgaggacggaaaccaaaactgaaccaaggttgagatcaagcctgtgaactagttaagcgggttggtttgatctgtgataacaattttgggtcttactatttggttggtttatctttgggtttttggtcgttgtagtttcaaggggcttaaatcattaaagaaattacattaataatgatgtagttcttgcaataatttatttaactgataagtaatcccgcatgtgtagacataactgttagatcttgagcaaattttagtctagacctggtgagttttcacatttttcttagatactgtgagttgtcagactgaagagttcttcacacggaattgggagacaagtcagacgctttgtgcgtttgtttttattgtctgccatttttttttatcatttgggagaaaggtttcgcatgaagaaagttgtactttttctctgccctagcatggttgatgtccgagtatctgaactaatcagtggtgttatctgagaatcttttaggattgacaggtcgttggttttactctattattttccatgtttcttatctgaagaactactcagaggtgtctatcatgtcttctttgatagattaagaaccaatgtataatgcgtgtgcaaattgatcaacgtatcatgcacaccacctaggatagtaaactaaacatctagcatcaaatcttaaaactgtaccagatttatatgctttaacaattttgcgactccaaggggtataaagagtctcaactattcaagtcagagtataatataatgatgaagtttcaagcccttcaagaacaaatgtcttccccatcattgatcactctcaaagcgtttgttgaagttgtatgtgctaatgcacaagaacacttcttagtttttgtataaatatagtaacgtatagttttgaagaggcctggaattattgggaagcaagctaccagttttggaagtctgaatatttttagaggccctgaaataaacagttccaaaaacatgtaattgttcttttcggtgcctcaatggctatccaagcttcacccccaacccacccacacacacacaaacacacaagatttatcttaggtgtctttgtattggaagacaaaaatggaaataagttagccaatctttcattaattggtctgggagttattgggaagcaaaccacctgttttgtgagtctgaaaatatattctctaaaggctagcaaagttccccaacacacatgcacaggacttctcttcttgtgtctgtgtattgggagacaaatgaagataagcctagtttattatctagccaatcattgattgaattagtctggggtttattggtcataaatttagagtgtattgttgtatactagtcctgacataatttatataccagtgtggagcacatagtaacatgcatatttaaatgcttgtcttccaagatgttagttatttattgttacacatggcctgttcgcctgccttggtgtgggtagggtggttaaaagctatatcactatttgctgaacctgtgctttttaaaatgctctctctcacttgtggaattaatatattaaggttt

SEQ ID NO: 14329 - DNA, 1183 bp, Aquilegia coerulea
  Intron number 6 from transcript AcoGoldSmith_v1.003088m (l ocus AcoGoldSmith_v1.003088m.g) derived from phytozome v7. 0 (chr-ID scaffold_9; pos 3698955 to 3700137)
tgtgctacacgttgctctggctctttagctgtgaggtttgcaaacttctgctagttgttggcttttactggtataaattcggttttgagttttggaaatgaatattcgtagtcttgcacttgtatgtcaagtaaaataactatttgacatataggtatcattcataactgaggtaacctttgacatcttccagagatgggaaggatataagaaggcctttgcaaatttccggaattgaaactactttagttttatattgcatattgttcttaagtgaaaaacctacctaaataggaacactggctggtactttgcacttaaatgacacacagctcttctggctctgtttgattgtgctgaaattcaaatttgtccatatttgactacatgattttccaatttaaaatgaaaaattgtaccatagtaaatggaagaacatcaacaggtagcacttgttgatattgtggtttctgcttagtagttaataccaccctaaaaacaaatgtctttaagttattacttctatttgctaccgaatccatattatttttaagatttaatatgtagtcatttacctttagaagcctagtcaagccttcactttcctcatgacatgttgcaaagtgacgaatgcccatggaataggaatctgttcacttcccctgcggtgcagcaacatagaagaaaaacattgctttaaccaggagattctcgaacagctggagaccttcagagatccaccatccatattatacattctaaacaattatttttaattaaaatatttaagttgaagttacttaatcataattcttcaagacattggctatcttcaagtcaagtgctcatatccaatgttgacgttcaaaaatgggcgctctgttgtttaattctggtttaatgaaaggagcaatctagtaattcttttgttcaaggtaaaataggggtgtttttttttcttccaaaatttgtggccacaattgttgcttaatttcgtaccagaagaaaatgatcactgaaaatgtatcaattaaaggatgacataagctttcatgtgatcagttctatcatttagtaatctacctaagatttatgtctgaattgcctttttctttctttcgtttctttatttttagattaatattcttgtgatttcattcttaattggctttagtttgtaggt

SEQ ID NO: 14330 - DNA, 1479 bp, Aquilegia coerulea
  Intron number 1 from transcript AcoGoldSmith_v1.002998m (l ocus AcoGoldSmith_v1.002998m.g) derived from phytozome v7. 0 (chr-ID scaffold_26; pos 2245044 to 2246522)
caataaattgcttactctacgtacttcttagtctggtatgtttgcttatgtaattacttccattttgttctttatggttattgattgctgcttaatttgatttcctttttttaattgtgttgttatattgaaatgagcaaatggctagagaaaagaaagcactttaatcaatatttatattaagctacaacaacgtactgaggaagaatagatatgtcatattactttgactctaaaatctagagtagaattaaggcattggcgcccctgctttcaagagtaaattgtttgttttgaagtttcaggtggtttgataagatgttcaaacccctggtttaatattgcatagactttgaaaatttcatcattattggtaaggaaatcgattccacgacagactgaattctgtgttaggaacatccgtttgcgccagtattaaatctccaactggcaaattgatcaactacctgtgcataccgaatttgctgttttttattgtaatatatataatgcactttaaaaagctgttattacttcccctctacgggttctgttctgttatacacatttgacacacaaacaacggtttatgaagaattctaatatacgttgtgcattacggcattacctgatagcaatgaattgcaatcctgcttgcatgcatgcacacactcctttgtttaattgtcggttatgttttggtttaaagctctgaagaaaatgcatgtaatgatatcaatcttcatttttggtacatgcaatgtggagaccaatctctcgtgttacatggagatctattgacgaattaatattttccacataaaattttgctaaatttgacagtatatctcatttttgtggatcgttgcctatatatacttatcctacctatatgccatctgatcaaaacttttcagttgctataatggttatacacttttttggggttgctgactccttcaactagttgactagcttataaatgagatgaatatgacaaggaaagagatgatatagtaaacaattatgcagaatagtcatcacaatcgcgggagttggcagtgaaggttggacaaagttatagtgaacagccatccatggactagacattcctttccgacttttttttatcagtataagttaaaattagaataaaattgaggaggagactttgtaagaaatgtttgaatattattttttaacttttcttaaaatatcatttgtagctggacatcagttgtttagtattcatgttttcatgtatgaaggccctcgatgacctttaaggaaagagagatagaccgttcaactgatggctgaatctgttttctaatatgtttctagtttatattaatgctcatcatgaatatatgttccattcggtttaagactcccataaatggcttaaagaacattgtgattgaccctggattcattgtttaagggaattgctggagctgccgttcgttacctgggcta

SEQ ID NO: 14331 - DNA, 1355 bp, Aquilegia coerulea
  Intron number 1 from transcript AcoGoldSmith_v1.011997m (l ocus AcoGoldSmith_v1.011997m.g) derived from phytozome v7. 0 (chr-ID scaffold_34; pos 1007260 to 1008614 reverse stra nd)
cacggcaaggtataccataccatttgattttaatacccttttcctcgttccgatgttttaatctgatttggttatttaatctcttctttaatttatttatgttgatcttatgagttagatcttttttgtctgctcggtttcagctgcaattttgaatattctgaaaatttgtgaatttgcatcactagtattagattttgcccaaaaatataaaaattaggctggtcttgtcgtcgagagattgttttttcttgcgaaataatcgcatatcagaatacaatttttgtacaaatacaaaacaaaagagctcaactgctaattgataatttgtaatatctcgagaaaattgactaactaatagtctaataggatgatttcaacattaacttcttgtaatgaaaattgaaaaaattgacttgtttgcccgctttcaaaaattatgaacatccattatgcccttttccaaaacttgaaatcaccacctaactaaagatgcctattgagtttctcttattctcgggatgcatatgaaaatcatgtttgttgtagttaaaagattcaagtatgccttttttagtttctcctaatctctacctaaccacctaagatgcgtcttttcaattcaagtaaattttcatatccacttcttaaattaggtgtagatgcagtatcttttccatgccaaatacttgaagcctaagattgtgaatgctgcaaccattcattacttaaagggagcttttaataagtgtcatacttcacagttgcatgtagaatgttagaaattaagggtcaacagatgtttaataccataatttgtggatctttgttaataaagttttttttttcttttttggtagttatgtagttaaacttgtcaaagtcaatttgatggccttgcggtctgcaagtagtttaatgattcttattcttttgttagggccttttaacatggttgtctgtaggagcttaatgagttagtttactggggtcaactagtatcaactatcaacatttatttgtttttttactgtcttgattgtatgtgtcacatatatatatatattttacattcaaacatatatcagcttataattttgtttacttgcgtgatagaaagtacaaataaaatagattcaggtatggcaatctgttcacaaaatttcgaaaacaatctatataaaatacatataaaaatggtagaaaggccttatgctttggactttctatgaagaattgtgggtaggtctttgaacttctgtaaaatacttagctgtttatctcaacttgtttgagataggactagttcaatttcaatccaggaattaagcaccttgtaattttggaacaggtgt

SEQ ID NO: 14332 - DNA, 1032 bp, Aquilegia coerulea
  Intron number 1 from transcript AcoGoldSmith_v1.009435m (l ocus AcoGoldSmith_v1.009435m.g) derived from phytozome v7. 0 (chr-ID scaffold_1; pos 4324027 to 4325058)
catcttcgttgcctcagttatttacctcattgcaggtgagttcttttaagtcccctttaagattttattcttaaatttgtagtagtagagttggattttataaaacatgttggttgtgccatttggtcgctttttttagtctgaactcaattcctttggatgatgtgaatttgagtgcttaggtggtgaaatgtgctgagacttatgttttaaaggagattaggagagtacgaaataagtaattagttataatccattcaagtttggaagttgcatttttggatttgtaataataattgtgttaaagcttaataatcgactgactttagaaggttcatttagagttgggtgatgctaaaaccgtgtgtgtacgtctcttttccaattttatattctctcctactgctctctctggctcaactctcctctattctccttatacgcctctccttcaacttaaagtcggtcttcactggtcacggttcatttataccaatatgacatggttgatgctcaaatctgatgcacttttacttattagttttccttgaccattctgtggtttgtatcttagtactatgattctttatgttaattacctctatattaaaaataattgttgcacgaggttgcccaagctcaacctatgtgaaaaaaaattccacaggtaccgccgagacagtcattgaccttttccttttctttgaaatttaatattctttgtggtcgtcagttgctcagaagttctgtcgtatggtctctctgatggatgggcgtaatattattattgatttgttgaatttttattccgtcatatatcttttgaaagtacgaaatcaagtaggaagctgtatgttagttcttattcaaatcaagtagaaatcaagtagtttgtggtccatcttgttaaaaaatgtgttccattagtggatgttttatcgttcttcacacaaaattaatattttcctgtttgtctgtgcttctatctatattccaggtattcttgttgcgtattctgctcctgcaagacat

SEQ ID NO: 14333 - DNA, 1519 bp, Aquilegia coerulea
  Intron number 9 from transcript AcoGoldSmith_v1.003654m (l ocus AcoGoldSmith_v1.003654m.g) derived from phytozome v7. 0 (chr-ID scaffold_20; pos 684619 to 686137 reverse strand )
ctttgattgagtctttgttcttcccagctcttcaggtatcctcacaattggagttttattttggcctatatggctatattcaatgccaaacacttaccaattgtttaccttagataatatagtttcttcatacttttatatatttcaaacttgttgaatttcatttttgctttttaagtttgattctgtctacatatgattttttttttttggttggcaagcgggattgaggggacccctacccttttaaattacgtgtggaaacttatatcaacaatcaactcttgacgtgtttcgaacccacgacctcttcactttgtgcgagggatgtaaccattaaacgatctgttcaaccctcaaaagccaaactatagtgtggagtatgttaataatatatactggcgaattattatgccaagaagaagagaattgaaaggaagaaattaacaaacccaaaatttttgctcatatatttactaaatgaaaagaaactctgctcatgcatagagaagaaccagttctggactatggatacatatctgataccgttaaaaagttaaaacaaggcttactttgtttctctatttaatgaccattacaagtactctaaagaaaagggactaggtggtattgcttgaagactcagaagacttaaaggtcttcagttaagattttcatgaaagggtaaggtaaattataggggtggctgaataatagagtaagacgtctgtggatggtgggatactaaaaaatgtgaatgggcgggataatgttgtgattttcaagctagtagcctcttggagagtttttgtttagttttcttctcttaaagggcgtgggtagttttttcttaaaaaaaaaaacccatctgcaattctcgccgagatgggaagctcagtttattgttgaatcggccgatctcaactattttattggatccgataagtctcagaataaggcgtgttgtatccctcctatagtaagagtcgatttctttccaaaatctcactgaagtgtcactaattaaatagcacatggcttaatagaataagaaccttttcttctatttgttttaaataaggttctttggcaccttcatctttgatgttctttttcattctgagatattttacatccaattaagatttgtaggtggaacttgattttaagacgttgtgttccaattcttgtaaacaattttcactttaatttttatttttgcttgtcaatcccttccttaattgcgtcaattaggcattgcctgtaagatgcttgattttaccaataaataaggttaaagagttagttgacagataaaaacaaattgttgcgtcaatattggtgggctggtacactgggcatattaggcctctcgagatttatatttttttattagaagtctttcttcatttactttattccagatctttttattttaaaatgaaactgtttggctgtaacttatacgatgtttcctttttggggtttgtttgcatctctgcagggggagtcggggaaa

SEQ ID NO: 14334 - DNA, 1062 bp, Aquilegia coerulea
  Intron number 2 from transcript AcoGoldSmith_v1.001029m (l ocus AcoGoldSmith_v1.001029m.g) derived from phytozome v7. 0 (chr-ID scaffold_68; pos 692415 to 693476 reverse strand )
gaaatcaattggcgtggtatgtatcacttaatgtcatgagatcgatgttgttttatttgacacatgaattgatcaacttgatgcaggctcaatattcattaattacaatgtcaaattatactggttaaaaaagtattatttttctgctgcaagcctgcaatccaattgatagtgctggctaatttcttttgccttgcaaaaatgatgtttccccccttttctttaatcattgtagttctcacctcccatttgctgcttgatgaaggatacatttgtttaaactgatttaatgcataacaatttcatgaagtttgccaaagtaaaatgaagctgtttttaggcattcacagtagaatctaatttgtatcttcttaaagccacattatacttattaatccttatcttgatttgggtttatctaaatggagtcataattaactttagcagacatgcttctggctcggctgattgcttttcgcaagatacattcacatatgtccatactagtactgcaagtattgtatattattgcgtaggactataaactttaaagaaaaggaacttacatcttaggcatgccaaactaatctaagttccgctagtgggttgcctattgattatgttagcaccaaaattcacgtatccatcaattcaacgtttgtcatctataagaattccgaaaatattccataaatctcagttatcaagctggaaagtaactaaggtgtatattctgcttagtagattatgtaatgttgcttttagtgataatataaggaagaattagattgcccaatataacactatttcagtagatcagcttaatatgcgacaccctctttctctttcacaacttctttactcgtgcatatctcttatggaaacaaatagtatggctttcatgttcactgctctctattttgtataagctgtctttcttgtggtgatatacacttttatgtatacatcacgttataggtggccactatattgtttgaactcgatgtaaatatcatcacaatgcttgagttgattttctttcttcttttcaggctatttcaa

SEQ ID NO: 14335 - DNA, 855 bp, Aquilegia coerulea
  Intron number 4 from transcript AcoGoldSmith_v1.001013m (l ocus AcoGoldSmith_v1.001013m.g) derived from phytozome v7. 0 (chr-ID scaffold_30; pos 2713833 to 2714687)
tattggtgacagaggaggatctttttctagagaaagtaagaatatcctctatttcattgacgtactagtggttacaatatattctgtctaattcacccattcctgacgtggaaatagcaacttacctgaacgcaaggcgctttaactttagattgtacctctgcacacacattatgcatttggaactatgggatttatctttacttaggtatgtaatggactaaaatccataccggaaaagccatgtcacgatagtttgtttttttatgacattttgacaagctttccgtgttgtcgtggctgctaagctatacatgaaaaacaggccttctgactttagttggtagcatgtaaataatgaagtcaattgagctgacttgttgagcattacaaactgaatgtccaaagtatatatgtaaataaacagctccatcgaagatgtataaatttaatgttttctgagaaaaagttcttaatacatgtcaactgtatctttttctttgctgctggaatttactccttcaaattggagaagccaatcatctatatagtgttcatgtcttatgtgaattcatccatttctcaagtatcatcctcaatttcctttgattcaaacactttttaagaggatttactaataataattaaatatattagttgtgtgtttattcttttgttctttgtaggttgtgtatatcatatgtgattattattagcaactctttgtgggaaagtctgtgtttttcctaatcttgtaacaatatttggtaacaaattcctgtttgggtgatggtcattgcttaaataaggatgctttataaaattctctcattttccaggttcgtcagctgcgga

SEQ ID NO: 14336 - DNA, 904 bp, Aquilegia coerulea
  Intron number 3 from transcript AcoGoldSmith_v1.019038m (l ocus AcoGoldSmith_v1.019038m.g) derived from phytozome v7. 0 (chr-ID scaffold_14; pos 4474706 to 4475609)
accttgtaagcaacttttatttttgaattgttttgattttatctgtagttaatatgaatgtgattacagtgtgctctctaaaattttagaaacatgtttttgctgattgtagtttgtatctgctaattactcattctatttttacgggattctgggatttagtatgttatccaaggaatatcatggaggaagacagtatataattcaacttaattatgaattcacgtgtagcttcaagtaggaagaaaatatatgctatcaacggtgttttgggtcaaagttctctggtgtagttccaacgtactaaaagaattcttatgaagcagaagcccagggggtgtatctgtttagaaacatataagagtctactcttcctgggttgaggataatcgagagaattgtagactttcacagttaaatagaattacaacatatttcttaagtattcctgacaatcttaaacttttgcgcttatagtcatagactcataggggtagccattttcggttcgtgtgcacattatttttctttaacattttgtataaacgtaacctccacaaagtttatgtttttgttgtgatcatgttgaaaacatttgccaaattagaatgacacaaaaaaaaaaaaaaattctcatgctagcatatttcgaaacaaaaacttagatgaacaggtagagaatggtttcagtagtaatgctgtaacaccccgtggggtcgtgataaatgcagacagtgttgcacacctgaaactatccttaatatttaccttaccatgctgggatgatgcatcaagaaatctcggtgtttataggaacttaggaagagttattcagcctggattgaagccatttgtatatttgatctcatatttttttgcaatttttgtttgcagatagatagcc

SEQ ID NO: 14337 - DNA, 1924 bp, Aquilegia coerulea
  Intron number 4 from transcript AcoGoldSmith_v1.017131m (l ocus AcoGoldSmith_v1.017131m.g) derived from phytozome v7. 0 (chr-ID scaffold_34; pos 1839165 to 1841088)
gaaacgtcgcaaggtttattaatcacaggtaagccaacacattcaaacatatgtttttttttttctgttttactgcatacagcatttcattattaaatgtaagagtggctgtagttggttgtctattagtcttttgtaattattctgtgttgctgaagctactacttggatatggtcttttgggaattttatagaccgaagattttgttctttgttgcaaggaatgaactgcaacacataataaaatcgtgactataggtatattcctcatcggtgcatgtatttggtaaatatgctgtgcactattacttaatattatgtcatttctatatgtttgagcttttgtccccctagtttgatatatatgttaatttgtgagctgtgttgaataaataattactattgtacagaaaatctatattgcaaaggcaaaggtggtagaaataacatctatatgatattagttacagaattacagtaagaccaactagggtcttagatgacttttatttggtgatcctagctaatggacgttttatttatatctagaattcgggtagatttatcatattgttctcgtgagtattttattggggagctctatttatgaaaactgcatgcaagattcttgactaaggggtgcatttggttcacggaatttagatttttggaaagtggaggatatgtttggaatcgaaaagatatggaaggagaaaggcagcagaaaagagagaaggcgaacagagaaggaagtatcggagaatcttataacttggccataatgccgggccagaaatggaaacttgtttccttttctgatcaacacaaactatatgcctaaaaactcttagtactcagaatctgttttccttgatctgttcctaaattaagcaatgtacccctggttttgcaggaattgtaattccgtgaaccaaacatacctaagaattttattcttttctccagctgactgtacacaaatcaagtaatacattcagagtatattgtcatggaactcctccaatgaaaatgcaatctgagatgatatatatagaacttatgggccaataagtgtttctgtaatggaataagtgaaagttgcattggtatccgttggatgacagtcattctaaccgtagtgactgatttgaccgacaatgaatcactcatttattgactcattttgttggtgcagccacgacggttacgatataaccaagtagttcatacaattaggtgtagatattagacttgatttagggatattaacctggctacactatcttagctaaagttttggattctaggtttgatgaacttgctaacctgcatgtgctttctttgtatcatatttttatttaatggtaaacgatgggtattgattgtaaattcatgtagcagcataacaaattacaagatgccctttccagtgataataatgactgcaagttcatttcctggtcaagcatcaataatggtttgcttgcttgccttgcaagttgaagaaaattgtgcttctaggtttgtatgattgtatatatgttaggtagttccaccactaatttaccatagtagttgcaaatggggtcagaactttactgcagttttgaagatatttgcagctactgattggtatttcggtgttgaaatctacataaaatccattgcccttggatcacttattagttattataacacaacagtgtcttgtgatcctaaaagatgtataattctgtaagatcttatataactataagaccaaaatacaactatcagcttgtagggaatctattaaatacaggtaccagccaccttagttggtaaagaccttggtgcagaacctgtccccgccacctatattattaaatgctctgtataaaaagattctcatactttaaatattacctttatttgattgcttcag

SEQ ID NO: 14338 - DNA, 1944 bp, Aquilegia coerulea
  Intron number 13 from transcript AcoGoldSmith_v1.004507m ( locus AcoGoldSmith_v1.004507m.g) derived from phytozome v7 .0 (chr-ID scaffold_14; pos 5380955 to 5382898)
ttagtgctcatactggccatcttgtaagtgtgacctagacttgttattctttcttaataatatattatatatatgtttatgttgttttctcagattcccatttaaagaatcatggtagaagctaggctaatggcttagctctataccattttaagtacttagtttcaggcataatagatacacaatattcatgactataacctgcttctaccaattgcttattagagttgcaaatctaaacgacttagataagatggagccagacaactcactattattattattatcaaatatcaagtaataaatatactaagttttactaaatggggggggggggggtaccaaattgatcgacacttaaagattccatggtaccgtaaatcttcaagttacataacaaatttctctgaacgtgtaattatttcttgtttatcatgtgttatctttttacatgttaacttgtttgcgaatcttttctaatattttttattgttaggtttcttcaaagaaatcatccaagcttatcaatattattattattattattatttttttattttttgcagcaattgttttttattgttaccatcatcattattattatttttttagtaggcaagcagggttttatctagggtccctcaccctgtttcattaataataaaaagcttgttataatctttcatatactctcccatgagcatcatcatagactatcttcctaatgtcctcagagaaggaccatcattattattgtattttatgtatttatatattttggctggttagacttagacctggaccaaatgaattatcaactccaaactcttactgtgacaacagtaactgctcatcactcaacaccgtagccatttgaggtgctgccatagcgctctcacatccaagagagtgggaacctgagaagtgcgagttaagtgcactgatgactgatcaacccccaaaattccagtatctttaaagacatgagccaatactcataagtggaccctcaaaatatccatttcttaacttcctaatagtagccacggtggtgccctaagcaacataaacttagagctattcacatcttaccacctttactctttctcctcggccctacccttcctgaatcattctctcatgtcaatcaatatgaagtcttgaaccatggggattagtcaaaagaatggtaattactgtgaactcgtcaatttttgtttcacaatcaagacctaacttatgcaattacatctataagcagtatggatgagtacctatgcaaccttttatttacgcatcttctttcttaaataagtagtggtgtactggtcaaggcttgggaggttgagcccatggtctgggagaaagggaataagagattcaggggggaataattgcaattaaaaaaaaaattagaaaaagaaaaaggaatgagtacccacactagcctgtatacatgtgtatggaatacactggcttatatagctgtaatgtagagttggagagcttaaagaatctaggccaaatgtggcatttttttttttttttgattggcaagcggggttgaggggactcctaccccttttaaattacgtgtggaaacttatatcaacaatcaactgttgacgtgtttcgaacccacgacctctccactttgtgagagggatgcaattgttgagccacaggctcgggtgcaatgtggcattactcatcttaaaagctgcttttatttgatgggtttctattgtatgctagtatgaattgctttcatcctttgacatctatttgatgaattttttattggctaggttggttaagatttgtgtttttaaccatctactttttgcttgctgtctgttgcatattgccaatgaagttctgattttctcttaccttgattaatcctcaggttgctagtgctctttcagatccctatctttcatt

SEQ ID NO: 14339 - DNA, 1394 bp, Aquilegia coerulea
  Intron number 2 from transcript AcoGoldSmith_v1.010799m (l ocus AcoGoldSmith_v1.010799m.g) derived from phytozome v7. 0 (chr-ID scaffold_109; pos 114344 to 115737)
ttacggatttggcttcttttcagacaaagagtcaggttagctggttttatttctgataaattcataaatcaatcaatgaatgtatcatacttgttgttttgttggggtccttgattttattctttttatttttatttttttttaatttagtctttactggatgcgagagatggtctagtcataattttcagtgcgtggtaccacccaattttgttacttttttttcccgttatataccattcttcttgtaaataatccccaaataacagtaataataactaccaattttttcttcaaattatctaattccatttacaaaaagtaaatattaaagaaacgatatttgatgctttaagagatgaaaaaaggaaaatagaattgttttgtttgtgagtgttgcccccaatcgtgggcacacaatttttcagtgtttatcaatctccaataatatattttttgtattacatgtaccacaaaaaaaataattagacatatcaaagatgttattcaaatctttttttgtattcaagagccaggacatgctcctaaccaatgtgaccaaacccctcgacaattcaaacagccgaactcaagatataacactttgcgtcaatgtcatcgtaattaatgacctcatgtacatagcaacttacctcaataattgaacacacacagatggccattactaacaaacctaatcctttagtggtcattcttgatttaaatactaggacttggttttgataagatagactaataaaagtaattggaacttcaactatttactctatttagagttgatttgtgggtatgggtagcaatggttgatcggatgtttttcgtaaatgatttaagtaggtagtcgagatacacctagtctgatattacaatatttatcgtatatataaagcattaaaacctgaaggaaagtacatattagctagcgtttgtctgtgattcaaaggcaagtggcagggccaccgggcagttgcatatatcaggaggttcttttctggctctattggttccagtatattactatgactatcagataaagaacttattttagaatgaagagcatatttgtttttaaatcaagatacttcactccagtacctatatggttcttagtttcttgattaagatgttgttcttagttgaatttggattgattcagttatgtagttatgttgaattcatgtttttttttgtcatttcaatttttttcccgatttgaattatatctacaaatgaaaatttgggtttaggtatcaggtacttctagtatttctgttcttgaaattgtaagtgatcacattttctaatattattcttctgtgatatgtctcattgtttcaggaattcttggatacttggtcctcaccctgtggcgg

SEQ ID NO: 14340 - DNA, 1722 bp, Aquilegia coerulea
  Intron number 9 from transcript AcoGoldSmith_v1.004571m (l ocus AcoGoldSmith_v1.004571m.g) derived from phytozome v7. 0 (chr-ID scaffold_32; pos 1081870 to 1083591 reverse stra nd)
cactatcagctaggattcgtatagtatgttcccttcctttatattcaaagttccttttacatgtatcacattaatgttttcctaccattagaatttcggactgataatgggacttctattggaagtttctcttggatagttttttggatgttagatcagtgtttaaaatggtgaggcgcaaggctaaagcgttttccttaaaaaaagcggggcgtaagctataaagcttaatggcgcaagctatttgtgcatttattttctttaattaaataaatatttataaatatataacatcaaaataattcataaaaatcacaaaatgatagataatgtcataaactcataattcaaacataggttcaaaaggctacataatgtcataaactcataatcaaaacacaacatgataatcaactaattaagacttcttgaggttcttcaaagttcaaacttaatcaacaatcagcccttaagttgttagggacttggtgtttgttttagtcaacaatcagcccttaagttgttaagttgcaacctcttaatccaaaccatccatatccgaaaaacataaactaagggtttaaaagcaaaagcacatgtagcgtgggtttttttataaatagtgcgagtttttgcccaaaaacgttgatggaggcccaatagcgtaagctttttgtgcaccaggcttttactagtataagccttgaggcgtttttgggtcaaaacgccttaaggtgagcttttgtacgcctttttaaacagtgttacaacttgacaattttgtacatctgaaaaaaagtgaaacccatatattcagtaaccatagaatttataattgcagattactttcaagtttcaaccttctataatactgcaacatgcctttataaaatctgctataataatttaggcgaactgtgtttgtgagcagaaaaaagaaagaatatttgatgagctaaatattttatgtagctaacatgatcgtggactattgaaacactaatggtaaggaaaacaattatatgaatatatgcaatattgagttgctgaattacactattacagatattttcatttttaatcgaaaacttcgattgtgctattgtttgctactctgcttgcatgaaaatgtaacttttgtcatccatttcagttagtatgaccatattagcttgttagttagtggaaatacattatttgatgagctaaataagttatgtagctaacatgatcctggactattgaaacactaatagtaaggaaaaaaattatatgaacatatgcaatattgtgttgctgaattacactattacagacattttcatttttaatcgaaaacttcgattgtgctatgtttgctactctgcttgcatgaaaatgtaacttttgtcatccatttcagttagtatgaccatactagcttgttagttagtagaaatacattattttttttcttgtagtttacaataataaaatataggaatataaattgtagtattgaaattcccaaatcaaaagtctgttcctttgtccactacagatatatgatataggaataaaaatttagtggttagttctcttggtagtatatcagggcatttggtttcaaaaaatttcttttagcatcaccaaatctttgtttcagtccgatctaatgaagtgccactaatcatgcacattgttttaggtcaagataagaggtagatcttttcattgtgaggc

SEQ ID NO: 14341 - DNA, 2686 bp, Aquilegia coerulea
  Intron number 6 from transcript AcoGoldSmith_v1.003535m (l ocus AcoGoldSmith_v1.003535m.g) derived from phytozome v7. 0 (chr-ID scaffold_16; pos 4865543 to 4868228)
cgacttctgaacaggtaagagtgatagcttatgaagttaaatcctttgcaacctaactagaaattaagtaaccagttgtgcatttacatttgcccttaaacttttcataatcttcttgaacagtggaagattagtttccctgaatattatacacatgtccctttatcttgtttatttttcatggcctcttgaactaatacaattccttctattgcggacacacatatatttccaaaacaacagaattgtgtaagggaaaggtgaagagaggctcacctaaagaacaaaccttaaagttgcaaaaagtcccaaacaaccaattattaagttatgtacatctcagttagatgacctcattgcacaactctccaaaagtaatttaagcaggaccctctacattaggatcaggcacagtttttttttatagcctgcacccgtgcatcctattgatcttctggttgaccaaactgaaattcactttctctagtggaactgatctcagttatttatatcgaattcgtagccattttccatgggtattcaagatattcaagttattctcaagtacctttatgtaaggtgactttgattttttttttctttctttcttgctaatgatctcccattcaaccatgcgaaatttccctcatgctttttacattaaaagaactcttattacaattgctcacgatgttctgtgctttgtcaccataattggagtagtgagatgtgcacatgtactgtatattggcataaagaagtcctgctatgaccagctcattgcattaggaagtctcgaagttcatctcacccacccttaaaaagaatatatttagtaaactgaagttttttcccatcaacactgaagttgttcaggaagattaggttagatgtagcaaggtaagtgacaagcacacattggcagcagcaccatcaaagtttagcagagcaaccaatcaccctctcgtgcaagagcattaattcacccccttatctaacagtcggacacccctcatgcatctgttcagattcctgcaaaagcttctagataactatctcataaaaagccttattggagaattttaatacagacaagttctttttgagttcttttatgtgtaaaactaaaaatacggacgttagtgtaggactatagatatgaatggatagaaaagtgtcaactattttcaatactgttatttttacacaaaaactattacagtgtctcctcttgtgtctgactggcatatattttaagtttttaaactaatagaatattattgttcattttttttatttgattggcaaacgtggttgagcggacccctaccctttttaaattacgtgtggaaacttacatcaacaatcagctgttgacgtgtttcgaacccatggcctctccactttgtgagagggatgcacctcatgtgttgttattgtgcatttgaatccgggttaattgtttatttttctttatatcttaagggcaaatttgtcatcagtcagaatcttatatctgtgttgatgatcatcctacaactgctattgctgtttctgtatttcattattgagtatagataagggaggggatttccctggtggtgaacacttcagcaataaacattggtgtcatgttaaggtttggaaaagggaagtgttagaagaaagttagtatggtataggaatgtaatgatgaaatctaaccctaagttgtacatgcaagtgtccagcaacctagttagtcaggtctctggtggctctttcagaaggttctcttttcacttaaattgggtgtggtaggtgtttcatatggttgtcacttagatacatggttatgtccaagcctttcatcacatgttggtatcacgatagtgggcgaagcatgtagctactacaactatagtatagacacgcttggggaacaagagtaataaaataatatccaagcacaatgagagagagaattttgcaaaagaacttattgatgaaataatatatgttgagaaaaggtaacatggtgccatcaatgttcttaaccctttggtagtgtcatcatcaccatttttatatattctgcattctaagttattcgctttaggtaactatattttccttcttccaatgccacatggtaacagtttttatggccttatgggtccatgtggccataaatactcataacagtttccattcatacgtttaggcttcgtgtggcattgtatgtatagttctcatgcacaggttatgcagcctgaacatgatttttttttggtccacatgtaaatggcaagtgaatattgcaatgggaaagagttaagttgtacttttaaaatccttgccaacacaagaaacttcggaagtcatgtttaccttgattttacgtgttggtaccaaatacttttgtgacggcttcattacagatattgggttgttgtcatgaatactatctgtagaccatctcattgattacattcacttgaaacataccgttagagaaattagaatctggttgctgaacaaggttgttggttgagcactatgcccctactctttaagaaattgttggataaaccaatatccagaaaattatactcatttgaattttgtataatttctggaaaaccaatctttttaatgaacacccttattgaaaaatcactgtgcaggttaattcagcaggagattt

SEQ ID NO: 14342 - DNA, 2891 bp, Aquilegia coerulea
  Intron number 6 from transcript AcoGoldSmith_v1.000082m (l ocus AcoGoldSmith_v1.000082m.g) derived from phytozome v7. 0 (chr-ID scaffold_31; pos 167864 to 170754 reverse strand )
ggcacatcactggtttgaggcagtgggttggtcaggttagttctattgttctttaaacgaaatatatgttagcttattccaaaatgcaaagtgaaataatcataggagcatccctccctaagtaaggagagatttataagctttttggatgaccatgcgagtatgcaactaaaccacaatagcatacacaccatggagtaaacattctaataactccttttattcttagcaaacccatacataagaagttcccttaaagcttagatatacagaatttctacacttcaggcttgtaattacaatgaattattccaatggaattataccactcgccttttataaaatactgcttgcttttatgaaataatacttccttcgtattaggttatagaaaaacctacaagactattccataggagttttctcccaagtagggacagaaaatgtggaagactgtcacagaggagcttctcttccgaagtaggtagagaaaacctacatgaattacagtgggggcctatttggaactaaaccacaatatcataaaacattaaaactatagactcttaactccttgctacttgtaatatctcctcacactctcaaaattgttcttgcatctttaaatttatcaaagttgctcctcgattttaagcaatgtttatgtttgttttatgcaatgtcatactccttacacacagagcttctgtgatgtatttcatgctccgccccttatttgcttcacctttgattcctggatagttgtttagctcatatttttaatgtgtatatcaagttattactttttttttggcagatcaaatttctaaaagtgcaatttgtagtctatcgtacctttttcctttagtataataaatcacacttttatcattctcctccccaaagtataggagcaattgatattggacatttacgaccttaagcctcgtggatactggcctacaacattattttgaactgttgtcaatgagatttaactaaacacctatctagttagaggaaggtgcctttgtgcctgcgagacaaattctagatggtgttttcgcagctaataaaaatattaataataagattatgagtaagtccaatggcccgacgtggacctgtcaaaagcctacatcacatgagttggacctatctgaattatatgctgaggcatatggatgtactaattactaggtggaatgtactaatggcctcatagagagggagaatagttggggatgtttttttctttctgctcccttgttgttggtcaatgagtcattctctcacctgcctctttagctgatgtaaacttatcattcatagataaaagtttattcacctaataataataataataataataataataataataataataataataatgctgaagcgtaggggcttgttaagtcggggaattgggttccggaagtgcacctcttctgctttggccggccgtgtaagtgagtgggtcaccagttggttggttcaggtatccctccattaccatctggaaccttgtgagagacatatttaaataaaaacttgttttattatatggacgttagttgtttaaagtagggagagtggtcctaacttagagacacacattgtccaatttccataagtactttatgttcgtgtttcattcccatgcccatgctagagtgcttcatagattggacaagatcatgaagtgcggagaatcacatttaagtgcaatagagtgtgtataagctttaaagtggcttggagttggaaaagactcatccaacggagtagctatggagattagggaacaagcctgaccatctttggaaaatgtgtggaaaaatcaacaggtttcagaacaggaaagccctacctgtaaagaagttagtatgggggaaagctatcaatttacgaacacaattaattgaaaaaactacacaaaattaaatcctagatccaaactttattgccaactatcttttcatagaaataactttgaaagttcatttttattgaggcctggaagccacttaacctaggattacttgtaaagtaagtatattttaagctgtaactagggaactaaatacataatattacaaataaaattacccaatatttgaaataaagggcatcttccggaaataaatgtgaaaatgcgaagacactgaaagtgagagttgttaaatgacaccatcactgtgcccctgcattatatctctcttgtttccctttgcacattgttctctttaaacatattctggcatcctcctttctaggatcaacttttcctacttttactaccatctctgcagtgcatccacagctatatctattgtcttatcagtcatctttttttaataaacttaatactgcttggtggttctcaaggagtaagcacctaactttcacagtcccagctagctgatcaattttgttgtgtgagcaaatcacgcagatggattgtcttcttttgtgaatttaatatggagggcctttttaattattagtgcagtgcagaaaaaatggttcatccattgaatgcttggttattatttattttattttttttctataagtgaatgacttagtaatacgtagtatgcataatgacttagttatacaattattttacaattccaattgtgataatgttaacttatatcattttgaggaagatttaaatttcaaaaggtgaaaattacaaaacatattgatcttggtcagatgttatctatttgcaatatatatggatataggtaaatctttctcttgtttatgttacccatatttaattgtgtcatcttcaacaatagttaagttggtgatccttattttgttgctatctgctctgccagagtaaagctaaagctgaaaagaatcaagcc

SEQ ID NO: 14343 - DNA, 2420 bp, Aquilegia coerulea
  Intron number 4 from transcript AcoGoldSmith_v1.006294m (l ocus AcoGoldSmith_v1.006294m.g) derived from phytozome v7. 0 (chr-ID scaffold_3; pos 9115395 to 9117814)
ttactcaggtgtgtttgtcactgttttgtattagttggcaatttgtgtttatcaaataactacttgcatttgcataagtcaacacctttttttttggtaatgcaaactgggagtttttatctggttaaatagaagtataaatcctttatgaagggaagaaatccaataaagccaaagagtggcaattcagagagagctttcacggatcaccttcatgaagaacaaacaaaaaacaaagagatccgaaaaagagataagaaaagatcaaggctccaggaaacccaagcatagcactgcactaggggtgggcaaaaaaaaccgaaaaaccgaaaccgaaccgaaaaaaccgagtcaaaaccggtcaaaaccgagttgactaaaaaccggtcaagaccggaccgaaaccgaaccgaactatatagctattgatccggtctcggttcttgtttttatagaaccgagaaaaccgaaccgaaccgaaataaataaaaaacattttttttattaggaaattactaaactagacataggaaagtagagaaacctaacttcattcctttttttccatctcaatccgcctccttcagtcctcttctccatctcaatcaaaatgtctcttctccatctcaatttccaccaccaccaccgccactctctccttcagtactataattgaatgcacttcctcgttcttcttttagtagcttctcaactaagggtctgtttgcaattgatttcgaattgggttgtattcaattgatttcgaattgggttgtattcttgtttccagatcattatctcaaggtatgttttgttttaattttcttagtgagatactgttattgaaccgagtctatctaatactctatttcgtcgtgattaccttaataatgccacaaatttcactgagattaagaaaggttttttcagtcaatttcttcaatcgtcatcaacatcttctgaactcaagggagataagctgatgaataagttgaaataaatgaatttaagtaaacaagatttgtggagattgttgtaccaagtaccaccaactgtgaccaaaatttgtggagattgttgctgttcgatttgcttcagatggaaacattttctcaacagattttttgtttgaaaaaatactccattgaatcaaaactgatgggtttgatttctcaactaactaatcattgggtgttatagtgctcatgatcaacatatatcattctcactcatgtattatactaatttggtacatcaattagtattggtatttatcatcaaaactagtctaaatccaattggaaaaaaaaaaaaagagaaatcaaaagaacaaaaagagacagtagagaactttcacgaaaaatagaaaaaaataacatttgtgctactatgagagaaagtgtggtcatatgcctaataatgggttttttgttttgattaatacaggtagcaaaagcaattggtggtattattcctttgtccatacctaagccagatgatccaagaaggaaagaattagagaagacggagaaacaaaaacagcttatgaagaagaagaattttgacgttcaaaggcccaataaaaaagcccaggaccgagtttcgaaccgaaaccggaccgattgtatttggtccggttcggtccggttacattcaaataatttcggtccatggaaccaaaaccgaaccgatactttcaagtcggtttggtcccggtcctattacattttaggaccggaccggaccgtgcccacccctacactgcactgacatacacaatcaacaaaccattgtccatttttgtctgttgaaacatgaagtaaacaagccagataacaccatcattccagacaatacttgccatctttccagataacaccactcaaaatgctcactgtattgaatccatcctttaaaaaactgtggagttagctttacgaattctggaatctggagtaagaacagcaacagtcagctctttggagtaaaactctctaataactaaatccttcggatccaaaatggtcttgatggcaatctacagaatctgtcatttagatacaatccatcattatggtcatgagataaaaatttgggtattcattatcttgcttttcaagtctttcatgctgtattcactctaatggttggtcactactatagggcatcctttcaaaaggatcgcctcgtaccctacgactgaaatgtcagcaaaaagttactaatacacacataactttagtttgaatagttatttgaagtatttcatgtgttattaatattcatgtttgtttatcacatagaagacttttacattcttgcaccaacatttgtggtgttaaatccaaagtctaaaattcttaatgtttcctgattaaattgtaggtccattttagccctggtcatcgtaacaagcttat

SEQ ID NO: 14344 - DNA, 478 bp, Aquilegia coerulea
  Intron number 1 from transcript AcoGoldSmith_v1.004105m (l ocus AcoGoldSmith_v1.003802m.g) derived from phytozome v7. 0 (chr-ID scaffold_23; pos 3795325 to 3795802 reverse stra nd)
ctttcttgctcttctacatcaaaacttcctccaaggtctcttgttgattgttttttttaattattcattccttgatttttgcagtatttatatgttcttttgatgttcttaaaagattctttgattttcttactgatttgctctgtttgactctgttattcattttgttaattagtaattagaatgtcttttactgcttgaagaatgttaccagtaaattattattcttaatttattagtacaattgttattatttcttctttatgctagatttgtagttatatttctcaaaatctatagctctctctatgtattcaagtaagtatttgtgtatgtatgattgtatcagtatgcatgcatattcatgcactataaaattctattacaagtttcaatttgtttactccatgcccaatcatgtctactttcatgttgatgttgttgcagccatcaaacagtttgtgcacccttcttcccc

SEQ ID NO: 14345 - DNA, 2578 bp, Aquilegia coerulea
  Intron number 4 from transcript AcoGoldSmith_v1.015792m (l ocus AcoGoldSmith_v1.015792m.g) derived from phytozome v7. 0 (chr-ID scaffold_19; pos 1778598 to 1781175)
cagcaggtagtcggacgattaaaatattttgggaggtattgactttttgaactaattggtttaagtttcttatgtgcttcgatgttctatttatttttcgttcttcttggtagttatcatcatgtacacagctaatatgctgcatgtatttctttactcttgaacttcagcttaaataatgttctgtaccagctagattacttgtatgcttgattttttgcttttgaatacttaaagataactgtcattgtgtgaggaacttgacaaagaaatctcctagttccttatctagtgtcatgcttaacagttaacaccaactgtaacatcccttctcactttttcttgataattatatcatggtccaggacacaagtacttagcttgtgataagtatgattctttagaattataaagtcatacttgaggtacatggagtttgatggttttaaagcttataatctactagagcaccctaaaacccgtttgtttcagttgtcttataaaatttgctagtaaaatatggctagttggaacaaatttctataagctcaatcctcgagcttatagctaatagaccactaataacttataagcttcttgtcagtactagctagaaaaaaaaaccaaatgaatgattttagtgttttataccttaagtaaactggaatcttcaaatcgtaagtcatactgacgacatttctatttcagtttactttaggtacaaggaaccatgtctgaatatttataagtatgaattttctgtatttatgtaattagatttgatgattgttaaagtttattttttgtaatgatttagttagttagctcagttctctttagttatcttccaaatcatccttctttcacagtttgtttatacacactcttctggtatcaaacttttattcaattccctcccattttaactatgaagaactaataggaagcatttgggatgcatgtcttgattcatcttcttaacttggtgccaaagccaattctaagaagtgtgtattccaagaacaagcaaaaataatatgctttcaagagttagttaaatccaaccactcccactaacggtctaaccctctctaggcagaacttgggggattctttcatcattttgaataggtcacttttgttaacctaaaataatgaacaagtatatatacataccagaatgaacatgaacattatatctttgataggtcattttgaataggtcacttttgttcatcattttgaataggtcatttttgttcaagatctagaatcgataaacttgttgatatcattcccttgcatttgaggatgaatggatagatgcatgtttcatgaggatacttgattaacaaaaatgccactgttccaagttacatgcacatttatatccttcattctatagaatagagatcagtgttctcagtgctatctgaggattgagtgccatgagataagtgccttccggaaaatccgttgatgctaattgaacatcataaaagctagtgaatgtgattatatcgtaagttaagatgtatgaaaccggcattcctcattgctgaatacgaagtctacatggcattccaatattctattgaagcaggcatgcatttcggtgcatgtgtgacaagtagcaacgtttttagtaaaaacaacttaaaaaaaggaactgtatacatattccagaaaccactatgcaatactgaatgcatagcgggtacatttcagacttttatgttagcgggtacatttcagacttttggaaatgtctgcgcttccttttcttacgttattttcttatatttctctttacagaatgtctataatcattcttgaacactttgttttatagtgtgtgttgggttttatattgtatcaaggaacatatcaatctcagtttacatggataatgaacattgaaatcctctttgggaaaaaggaacatcctcccaaaatagttgaaggtgaaagtgcccagaaaggtggacttcgaacattaaccgcctttgattctcttagtctactcaagaaagaaaaggatataaaagccttcataacagaagttcaatatcttttgccattgttgtaactggtatgtgccatagtttaaattttcgatttcgagcgaaatttcgtttcttaaaataccggcatatgtcgagattctgacattggaaatcacagtgcaagctgagattcgcgaaatttcacgagatttcatgataccgaattttcaaatatcggcatataccgtcgaaatttcacgaaatgtgacgaaattttaaactatggtatgtactattgtacttattttgtagtccctatgtgaagttttgggatatggtatcacctatctgtttattatcaagggactacatatttttgttaaatgagtgaacctttgtgactgttactatttttttttttgcttggggtggatttttgttacggtcttgttaatctctccatctcccttgaattatatgcctttttttttgtcaccattttattatattgttagttacgttgtttatattatctccttgcaggttattgaaggatttcaaccaaaggagcg

SEQ ID NO: 14346 - DNA, 2271 bp, Aquilegia coerulea
  Intron number 3 from transcript AcoGoldSmith_v1.024572m (l ocus AcoGoldSmith_v1.024572m.g) derived from phytozome v7. 0 (chr-ID scaffold_5; pos 3398629 to 3400899 reverse stran d)
ggggaagtgtttgttgggaaactggttctttaagggaatccgtttcatatttggatttctaagtccatattaaggatttagaatttggtattggaatatgacttccaatttgattaaatttggtattcctattaggaatttgttttgtacaccctaaaggctataaatataaggtcttagggattggtttactatcctcaatccatatttgttgtttgtctccttgtgagagttgtgaggatcttggatgtgagagagagtttgtatcctcaatttgtgattgtctctttgagagatttggtgaggatttgagaagggaggaaacctagggtttctccatttgtttgagagctttgtactatcttctccaatagtaaaagttctatttgtttgtccgtggacgtaggcaatattagccaaaccacgtaaatcttgtgttttgtgtgggtttgtttgatagtagtaggagtttcatcttctctattttgttttgtttaattcatacactattccaatcttgggtattggtgcataagtttccgctgcgcacaacaagtggcatcagagccgaaggttagttccttgggttaaagagggattgcagaacattggttaaagggttttgaggagtctgtccagatttgatactctgtggtaaaacggccataactctgttctcggatatcgaaacgttgatccgttttttgggttggaaagaagactcttcaggctttccaacggtgtatggtacgttttctgtttcaaagtattatgttcccagtaattctttgaagttgacggttttgttttctcaatttcggtaaaaatccaatcttggatttttcttgtggtacttggtgaactcttttggtttagtttgtttgtttggtttgctggtgtatgaaattgattggtatcatgtcggatcatatttcggattcgagtgattttggaattgcatagtaatatgaggcatgccgttgatggtactatgcaagtgaagacaaatttgtttgcgggtggcaaagcatgcatagttggtaggcattttgttgaagtgtcatttgttcgggtggagattgatgtgtcatttgttcgggtggagattgatgtcgctccacatttgattggtttgttaggtgacacgacaaagaagaaagttgaagccaccattgttagtagcaaggttatcgcccaagaaccttatgaagccgtgaaacctttgtttgggggttttgtgtacgtacttcctattgttggtaatctctcatgtgatgtttgtttggcgcttagtaaggaagacgtatttggtaaatctatgcatagtgatttgaatttgtaccccacttggttgaacttcataggaaaaactcttgagaggttagtttttcggggcattagatcatcttcgatggagaactttgttgaggtggagatagtatttggtagcttggaccccattgtgttgaagttgtttgtgagccctataaggcattggtgggcatttggttttgatttggccccttagggggatttggcctttcggggcattgtgggcattgaaagatgtccgtttggaagaactacgatggcttgatcccatggagggtacgtaggcagccacttgatggtccggccgctttggtttggttgttcgtcggtttttttgaagatcggctcagatttgggaaatcttcaccgaggtggagaattgttgggaaactggttctataagggaatccgtttcatatttggatttctaagtccatattaaggatttagaatttggtattggaatatgacttccaatttgattaaatttggtattcctattaggaatttgttttgtacaccctaaaggctataaatataaggtcttagggattggtttagtatcctcaatccatatttgttgtttgtctccttgtgagagttgtgaggatcttggatgtgagagagagtttgtatcctcaatttgtgattgtctctttgagagatttggtaaggatttgagaagggaggaaacctaggtttctccatttgtttgagagctttgtactatcttctccaatagtaaaagttctatttgtttgtccgtggacgtaggcaatattagccgaaccacgtaaattttgtgttttgtgtgggtttgtttgatagtagtaggagtttcatcttctctattttgttttgtttaattcatacactattccaatcttgggtattggtgcataagtttccgctgcgcacaacagtgtttacgagaataat

SEQ ID NO: 14347 - DNA, 2749 bp, Aquilegia coerulea
  Intron number 5 from transcript AcoGoldSmith_v1.005802m (l ocus AcoGoldSmith_v1.005802m.g) derived from phytozome v7. 0 (chr-ID scaffold_3; pos 3035857 to 3038605)
actgccaaacggtaagcttttgttttaaataatcttgttttttcagttaataaatttaacatactcacatggcacactttttagtaggttatgctgacatattcttcatctaattggtttggctaaattgtcatagcttttctgatctgtatcgattccattccacgtaatgaattttataaacttccatctcattctgaagtcctttagagcatctctaatgggtctgctataatccaaattatagaaataccgaaaaaaagcattccctaacgcgtcgtctataattttagcagccggctatccacgtaggatgtggtgggccggtttgctaaaacttcgtccaaaatcgaaccaaagatagaactataggaattgctaaaataaaatgttccacgctggttcaaccagcgtggaactttttttttattattattttaattccacgctggttcaaccagcgtgcaaaatttttttttttttttttttattccacgcaggtcaaaccggcgtggaacctttttttttttttttaattaattaaaattatgattaattagagatgattaacatgtttaatgtttaattaccaaatcaacatttttttttttttttttttttttattccacgcaggtcaaaccggcgtggaacctttttttttttttttttaattaattaaaattatgattaattagagatgattaacatgtttaatgtttaattaccaaatcaacattttttttttttttttttttattccacgcaggtcaaaccggcgtggaacattttttttaattccagcccaagtcttccacgctggttggaccagcgtggaacagaaaaacatttccacgctggtgcaaccagcgtggaagataaaaatttggcaaaaaaaataggaaacgcgttagggatacccctgatataggtatggaagacctgctaaaaaaaccgatagaaaaggaggtggcaccgacgtggaggctaaatcgtcccatgtgtaggccaaatatagcagacccattagagatgctcttaggtggcaaatgctttaattatagtaccatctgttttccacacaatttgcaaaaactatgtatttgtaggcggttcaaaatagacattaagagcacattggttcacttttacacaaattttcaataattgcctgggaagattgctgcagggtgcctttagccaatcttcacggcaaggacatggtccaaatctactaaatagtcgtgctcctcactacactataccacactcttccggaagtgagactcgggctaataaaaaaaattaagagagaaaaagtgtggggggctgggggtttatatttctgttacacacttaaaagcagggcaggatgtttcctgggactgcctatcggttttctgacaaatgatatataaaagttagatacaaggggaaaagggggggaggggggggtgtggttagcaagagggtctaaccttctagtccaaacaatttgttacacaacatttttatcaataactaccattaccgtgttgcaattctctcggaaggcactttgcaaaaattaaataaattcttttattttaaagcagatcctataaaagctatactttgagcataaacacgtaacagttggtgagaataacttgttattgaagagatcatttgtactacaatcgttgacagctgtggcaaagaaggtccttgtcaagccaaattgacaaagatacaatggcttttgtgggtgccactatttggagttgcaagcatattctttaggtcttaactaagtatgataatactgagatactggaccatttcattcatcaaagatggacaataggttttgagaactggcatctaacctctctgaaacaattttgaaccattatgaggaccttttaaaacaccaaaaagacgtattactgccgtacggctcatccctgctgcttctcaccaaaccttgagactaccatttctctcttatataagcagtgccccaagcaggaaaactgggaatgaagctggcttgacaaccaatatatgaatctgaagacaccaagttgttctcaactccaatcactgcattgagatataatgattttagttcttcagagttcagaccatcccaaagtagaaagagtaccactaggacccctaagatgagatcaagactgtcatggtccatactgattcctccacaacagaaagacagccaggtagttagcgatagttgttacacaaaatatctgaccaccataaggagaggagaaagaggggtgggaagaggtgcactgtccctcagaactcctctagcctgttaaagcacacatgatgagaccacttggccaaggccgaaaagcaagattgttaagtatcttctcccagcttcttccacctgggccataaccgcatgcgctcataatataatgcgggctagaattccccttagtgggcctttgtctacgacctcattcacattaatgttattctaatctttagacttctgctactgccataaactgaatgtcttctttaacatagattattttgttttccattgctttgttcatttaaatattattatggttttggagttcaattctgtattgcaagtacgtattaatatactaattatacataggagaaattatgtgttaactgagctaacatatatggtggttactatttactttgtttcattaaacttctttggttccttacacaaactcatttattgtcagaaac

SEQ ID NO: 14348 - DNA, 876 bp, Aquilegia coerulea
  Intron number 17 from transcript AcoGoldSmith_v1.000140m ( locus AcoGoldSmith_v1.000140m.g) derived from phytozome v7 .0 (chr-ID scaffold_53; pos 1364163 to 1365038)
aaggttcagtacttcagttacctatccttttgttttcgcattttgttagtcaactgaaaatagacattttttgtcggaatttggatttatgatcgttcttggaagtttttcaatacttgaccacgttctttaaaaagaaggcacttgaattccttttatctttgtgaggtagctacctaaatcataagtaaaggcagctaatataaagtgaagtgaaaagttgaaagattactcagtctagacaggatgttattctctgaacctgtctctattataaccaactgcccgaaaagaaatattctttgaaatatataaggaacctttggtacctgttactttataaataaggttggttacattgtgagactttgtaaatgagtgaggctgtagcatgaaagtcgacgccttgacgaaaaccattctgcttcattttatccggaaagttggttacccttgaatttgtttatctatcaaattagaatgcaagaactttgggccttacagaaaatagaaaccataaacagcagagaaaagttgatattgctgttttttatttaagaaatttggcaagattcttaggaaacatatgattggataatctgataagtgcaaggactgaatgtttgaaatgctatcgtggtggatcgttttggaatcctagtgttacagatcaattagatgggatcctgcctgcacacctgtctatagttctattctcagttgttaggatatagtttcttaaagtctataattctatatctatagtttcttaaagtatatccgttacgctttgctaagagtagtcgtacttttaaatttgctatgaataattcctaatctcataaaaaataccaggttggggctgcaccagattta

SEQ ID NO: 14349 - DNA, 1570 bp, Aquilegia coerulea; identical to SEQ ID NO: 14285
  Intron number 1 from transcript AcoGoldSmith_v1.002842m (l ocus AcoGoldSmith_v1.002827m.g) derived from phytozome v7. 0 (chr-ID scaffold_20; pos 3515001 to 3516570)

SEQ ID NO: 14350 - DNA, 3057 bp, Aquilegia coerulea
  Intron number 2 from transcript AcoGoldSmith_v1.004046m (l ocus AcoGoldSmith_v1.004046m.g) derived from phytozome v7. 0 (chr-ID scaffold_19; pos 2373696 to 2376752)
gttgaatcatttataaaacggtaatattctacgtttttcttttttacatgttttaagatgctcatgacttcatgagtcatgtgtgatagaattttgaagattgctataaataattgtccttctgaaagataatgccggtgtctcttttgtcttctgggcgttattagtgcaaatgaatcatctttattgtgaagtgtgcctgttgccctgttggatacttatagcactagcttagaatcatagaactaacgccttctgattcaagtatggtatcagattccacaaacttacgatgatgtgcttttccatgtcaactattttctattgaaattctagtatctgttgcactaactgatatatggcccaactaaaatattgaagtcctttaaatatcaatttttttttttccaaaagtccttatcttgacttgtagtctccgccagtaaatttatgttccacattttatctgttaagagcatggttgtgtcatcatagagtacaattacagtagatctcatactacaaagatttctaatcaataaaataagtccgaatcttgaggtaaatattacccagttgcctatgtagtggcaaaaccataaaccgatgtctagtttgaatcaaagccacgtgcgcagactagcagaaaccaattgactctgcatcataatgcacagatgattggaatcaagcatgccagaagtcctaaatatttcaaatattggggaaatgcatgaaatgaagccagctaacttatgtgaagtgaagaataataaattaaaacactcagaatctaggacttagaggagcaatgatagtcttgggaaagatctttctaaaatgtgaaattcatgtagccatgtaggttgctatttaaaacaaatccttcttaagtatacaccaacatttatacttttgataactttgactatacatgatgaccataacatatcagaaagctgagagtttatgaagcaagaaggatagactaaccaataagaatctaccaactagggtttttgcctagattcacctttacctacagagattttttttttttttcacttgctgaaacatcgtcctattaaaatttgttgtatgtatgaaagacgctgccaattataagatgcattccttgactagtagtcaacgattaccataatttcataaccactaagatatagaaattcaaccaataccatgtaagttttccgtagaaggtaacctactaatccataggccataatcaaataaagctcttgataattataagttcttttggaagggctctatctgaaacttgaataatagattaagtgtttgtgtttgctcattgataattggcttacaaataatatatgtgcaattgtggaggcaacattatttttattgtgcagaatgttctttgacattaatcatattttgttgtgcagaatgttcttttttacccttttttctgtttgctgaataaattttttatcaagaaaggatcttagtgggtactagggaggaggtgggtgagggagtagctcatctcccaccctgtctctcattaaagaaatgagacagtaaagccttgacattggtcactatactgtctaatctcgtttgttaattattgaacacaagagcattccttgtcttcccaatgacccatcaaatggcaatagggactagggaccgactaccatattcgattctgtgttaagtgttaactgcccctcctctctccctctctcgctttctcttatatgcaagtctagaaagagttgaattgcatttagtctcagtcaaaccagctgtctccataaccattttgcacataaatgataaaattgaaagaacagatgagctatagattgtggttactacctgcaaaatgctcaaaggtttggttcctctattttgtctccttaatttcgcaagtctgaagtatccccttgcccgaggaagaaactcattcttgatgggagctccttaattttctcttcttcatatcgctgaaggagagaagtcagctcatgtggttctgtctgcccgcctgctattcaatggtcgaaaaaagacttgacagtaaactttgctgcacctactcacaagtggtcaattgatgcttcttgtttccctgactcaccatggttttaatgatctgctatcaaacagtcatacaccgttttcttctgccaatactttatgatctcatcaactttatggtgtattatgatgagatttaatttgtgcctttgacacccatccccatgaacccgtctggctccagccctggtcaagccttaagggattaggctccaagttcttgggataaatttccacttcactttggtgaagctttaaagctttagggttagaagtagggatttctacccataaaaagatttaagaaattaacttaaaagacacatgggtagttattggtcgtgtatactccagcaacgtaagtgacctcactttaaaaccttgttctaccactccactcccctcttgtgccttactctttttaaattcttcacctacaacaatctttttaatgtcttactccaacccatgtgccttactccccgctccacttcaattgatgagtcatttcccacatatcacttattgactcatttttcttttgtgcgtaattctagaggtctccatgctttatcttaggcaattccgttactaaagggcataacactcacccttgacgtctttcaaactttcttgttgcaggacaatgttaaaatgtttccaagaatattagcataaataaattattaagatctttcattatctaccattatacaaatatctacaatgctatcatcgaagtctttattatgtaataacgtgatacgaacacgaagaactgactggccaatatgtccataagaaaaaggtaaaataactttgaagcttgttgaaccatttgtatgttagtttatatcgttatttgggtgtgtgcatgtgaactgtgaaggagttcctttcaagacaacggtcttttgattgtattcaggtaccagaattcaaacagcgggagctttccttcac

SEQ ID NO: 14351 - DNA, 1204 bp, Aquilegia coerulea
  Intron number 1 from transcript AcoGoldSmith_v1.003707m (l ocus AcoGoldSmith_v1.003707m.g) derived from phytozome v7. 0 (chr-ID scaffold_95; pos 170751 to 171954)
accagcttttcctttccgcattcagtagtagctaggtaataatcattctttttatttgattttaattataaatctttatcttcttctccatttgctgttgttacttgttaaatcaattaatcaatcaatcaatcaatctctatatcttcttcttcttctgagttctgatacccatttctctttctattcttttcaaaaaaaaaaataattctccaataccaatatgccgattcatccatgttaaatcttgatcactgtttgtgtttcaattctctttctaataacttatttcacctgttgcctttgtttttttccttatccatctctattatatatttgtatcatacagtatgtagcttttgcctgtacaaatctacaatgtaatgtacatctcattcgattcaaatacccccaatacctgtattatacattatttgtggttggtagcttcatatgcacacatgatttctcatactgtacaataccaaacatcactctaactctaaccactgtgtgtgtataatcatcaacctcacaagttttcagtgtttttgaggatattaaggttatagcatgccttcatatgcttcaaattagtaacaaaatgagtaaactttcctttgaacctgcaaaaaatttacaccaaatgtatcttactgtaatgtgttttttattagctccttacacataattctaaaacatagattaatctgccagcagggccggctcaagccattttgtggccttaggcaactaaaaaatgaggccttgtttacttaatacggaattattattattttgtccaatatatgtgtgattgtgtgaattaatatggattaatctgtattttcaattttttaacaaaacaaaaataataattccatatgttctatggaagtttcttgaaaaataattagatcaattaattacctcaataaaattactgtgaataaattaattactacctcaataaatataagaaatattaaagaatgaacagttatgcttagtaaaatgtggccccaaagtctcatagattatcaactttctttgtggggccttaggcacctgcctaatctgtcttaagggtagagcctcccctgtctgccagcctgcaatcttgtgccagacctacgatacttgcaataatgacttctatgtttcttttgtttttgtttcagcttcttcaacagtagtacttagt

SEQ ID NO: 14352 - DNA, 1450 bp, Aquilegia coerulea
  Intron number 4 from transcript AcoGoldSmith_v1.007275m (l ocus AcoGoldSmith_v1.007149m.g) derived from phytozome v7. 0 (chr-ID scaffold_43; pos 120480 to 121929 reverse strand )
agcgagaaaatcagaggaagcgcttcataaagaaggcaaggatattaatttctttctttgtccacctttatttatagttgtgcattgtcattttttattatcttttgtagtgcattgaatgggatactgtcatactgatctacctgatatgttattcttccactctgcttctctctctgacgaatactcttgatattatcgaaatatcaattgtctgaggtattcaattccaattttggctgcatcaggcaagtcatatagtagcggatacagttaataccaatgcataaagtccacgctccaatgtaaatttattcataataatcttgttttggtgccttgcacagtaagtaacgtggacaccatatttttttcttaaatccatgttggatacatggacactcaggcacatgtgtacacaacgggacatatgctagacacacttacatgatgatgcatagattttgaattagaatttgttgtaagaggctaaaatatgggaaaaaggaaacaacggagaaagaataataaagaaataagaagagatgaggaagagtttatctcatctacttatatttgaggaaaagataaaaaggtgtgaaggagagatgttattttctttgtctaaaacatggattagaaacaaaaatcacaatctgtgcctcgtgtcaaactgggtttagaatgccatgtcgaaaaccaacacacagctgtgtgaatgatacttagcttgtagatgtagcagaatggatatgcatgactattgggagcatatttcttttgcagaataatggcgaaaaccataagtatcaaatttattgatcacgttaagatgaattcacagaattatctctgcagaatagctattttccactccgtaaggttataaatttagaattgtaactgggttggtggattgctcaaataagatatatggaattgaggttggtggcatccatgattacaactgaaaaccgaaaggcacatatccctgattcccgttcaatagatttgataggttaaagctattctagtccttgtctcctagggcaaatacatcaacaataaagtgacaacaagcatatgccattgggtaaaggccaaatgtgtgcttaagtgtctgacatgagtacaactgtcagatgtggaatatatatgaggcacgctctttaatcatgtatcatcttctcttattagtctctagtctctactaatgatttcttaatgtcaatagcattcagcttgtcaagatatctaaatgagtatattcccttgagttaatttatatcctttatctactccctcattattagctttcagctaattatttcaattatttaaatgagctttttcccttgttagaagttccttttgatgcctggatcttaaatttgaagtgtctactctttctccaggagcaacaagagaaaatcagggcggaagccgcttt

SEQ ID NO: 14353 - DNA, 531 bp, Aquilegia coerulea
  Intron number 1 from transcript AcoGoldSmith_v1.007444m (l ocus AcoGoldSmith_v1.007444m.g) derived from phytozome v7. 0 (chr-ID scaffold_20; pos 3806604 to 3807134 reverse stra nd)
tcatctacctcactttctactcacgaagacaacctgtaagagatcttcttctcttcttttccacgtttttctattcatctctttcgatttgatttctttgaatttgatttttgtagtaatttgtgttaatgaattcgttctgaaacctgaactttcgatctcaattatcactaattccatttgcgaatttgcacatgtaaaaggaaaaccgcaatcactagctacatctgacgaatttcatttgaaatagttagaatattaattatgagattcagattcgtgtgtctttatgttcatgtttctatttgttgaaatctgaagaatcaaagctgttttacttgaaagttgaaatcaatgctcttgatctgaaaatatattgatgcttttggttatgaattatacttctgaagacaattattcgtactcatagtctatttctggatacaagaagattattggtactgtactactgattggttaaccaaatttcctaatataggtttgttgacattctgcacgaggctcctttat

SEQ ID NO: 14354 - DNA, 1652 bp, Aquilegia coerulea
  Intron number 1 from transcript AcoGoldSmith_v1.006624m (l ocus AcoGoldSmith_v1.006624m.g) derived from phytozome v7. 0 (chr-ID scaffold_5; pos 3983283 to 3984934)
ctacttctttctccggctctgctgctgctgctgctgtaagttctaaattctaatcttcttctaatcttctaagtttcttctaatcttattctaatcttcctgaatcaaatccaaatctaatcaaattcaaatcttattctttaaatttttttaatttttcaaatcaaattcaaatctttttcttttttcaatttaacttcaattgaagtgttaactgttaactgttcacatttgaatatattcagaaatttagaattagtagagtacactgttagtaaacgcgacatgaggtaagaaaaagaccgaatttggaagatttaaatttcagttccattgaattccattttcaatttcagtttcgttgaattccatttgttcaatcgatttaaatttcattttcgaaaatctattggaagcttggtttgcaccttgtactacaggtatcattttgctttcaatttgtgaaatttgtactgtgcttgtttatatgcaattgcatgtttgtggccattaatagtttacaaaattaatatattcattcaaataatcacaaactgctttgttgttggtttgcacttttttcgatcagtttatttgtagcaggttttactgatcattatccccttttttcgtctctcgttcgtgtgttaagtagcatgatttttgatacagtaaataaaagaacattttactagagttgatgcaacactaactgagaaagctagatagattcaactcagaaacgcgacattataataacatacagaattaataatgcattaatattaaaaaaaccaacaaaccacaaagttatgtttcctataactaataactaatctctatatagaattaggttggattctcaccaagtgaagcgcccagaaatccatagtaggcaatataccgaaaaatgtttacattgacctaaagctggaaacagtgttggattacttctatttttgtaacaactttatattataaatttacatcttattggaaagagtaaaaaaaaagagccacagtatacatatggcttactatgcgaactcaagtaagcaaaattctaatacaatttataaggtagtgacttaaatatcaattcaagatggaagaaaacattcgttctctaagccagttgctgggctttgttctatactgatgttttcttccatcttgaatcgatgtttaaatcactaccttataaattggattagaattctgcatgattttgcttagttatgcttacttgagttcgcagagtaagccatatgtatactgtggcttttttttttttacactttccaataaaatgtaaatttataatatagagttgttacaaaaataaaagtaatccaacactgtttccagctttaggtcaatgtaaacatttttcggtatattgcctactatggatttctgggcgcttcacttggtgagaatccaacgtaattctatatagagattagttagtagttataggaaacataactttgtggtttgttggtttttttaatattaatgcattattaatttgtctccttgtgtttaacaagggttgattgttaattacaacatgaattgcttttgattagtttttttttgatggtttcacatcaggggggttcaacttgacatcagtccttgccgcgttg

SEQ ID NO: 14355 - DNA, 1408 bp, Aquilegia coerulea
  Intron number 6 from transcript AcoGoldSmith_v1.012853m (l ocus AcoGoldSmith_v1.012853m.g) derived from phytozome v7. 0 (chr-ID scaffold_28; pos 1310650 to 1312057 reverse stra nd)
gtcatagaaaggtaagcatagtgtaactagcttttgcatattatggttagttgtcaaactcattttattccaagtgagaactgcctgctagaactgcattagcgtggcttcacgcgcatgagtttttcctttatatagtagaaaaaaatggaagtcttgtacacagaaattggaaaaaacaacgaaagacataatgctagcacattaaccggttagcccaggtattatttgaataatacgaatgcttagtaatttggaagaatacttttttttttggaagaatacaaatttatacaacttttatgaaaacaagtaagtccatggccccatatttcaattatcacatggattctgttttagtgtagctcgtctccattcattttgtggttcttgcttaagctacaaattggaaagacaaagagctagacaccccaaaataataataaagaataaatatcttcctattttaaaaaggaatttttgtacctgctttacaacttagaaactacatggttttttttatgagaggtgaatactattgtgttttgttgccgttatagtctggaattttggggttatgcttttgcgggagattatagttgtgatataagttttgttgcttttatctgtaatgtttctcaattgtcacttaaaactatgctctttctgtttggttcttatcttacaaatagcgaagatctttgtgcttaggggtggtgggtagggcaggaaacggattggatacggagcagatatatagtcatccatatccgtatccgaattttttttagtatatccgtttccgtatccgtattcgagtcggactgaattcttcgtacagtgtccgtttttaattcggatcgaatatccgaatctgtttcggtttgattttctgtaactaaaaactaaatatgagaaattataataaaaagtttctggatatatccggattttataaataaaaaatttgaattgttaggtttttatttttatatgtaatttgatgaccatattagccttgtaaaaatggtctattattggtgtaaaaatataaatttggatatatccggattttatccgtatccgagccggttaaaatagtataaccgtatccgaattcaaatccggataatttttttgaaccatatccgttgtattcggatttcggtcagtcggatattcggataaatccgacccgatttcctgccctagtggtgggggtgcatgttgtttttatataaaattgtatgtttggactgacagtatcaccatctgagggtttcagtaaatgtggtatttcatattattgtttatgtctttggagtgccaagtatcagcatgttattatgtagtatgtagtattagattgcagattcacattgttatatgtgttttatatgattgcagg

SEQ ID NO: 14356 - DNA, 868 bp, Aquilegia coerulea
  Intron number 5 from transcript AcoGoldSmith_v1.008108m (l ocus AcoGoldSmith_v1.008108m.g) derived from phytozome v7. 0 (chr-ID scaffold_6; pos 7425368 to 7426235)
caacaagtcaattgaggaagaagggggtaaggacaagttcctttattgaacacacctcttacaggaaatgaatatatttgaattaagttgttttctgatggttgtattgttcaaacctgtatgactctttgtatgtcaaaacccaaaaatattgaaatttacggcttgggatgcttataggaaacccaatctaaagttctgctttcattggattgcagtgttttaatcattttaatttacagtatatgatttcctcattaacagatattctagtagttgatggtgctgcgaagtttgtcattttgcaaagctttcacttgattcctttcttcattcagaaactgttccagttgctaggattgtccacattttagtagatttgacttcagaataacgacccttgattccatgttgccagtgagatttgcctgaaatacttgcatatcttgtaatgcaggcacactatcttatagttcttgtccttataactgatagaatcgtagcgaaagcagttactgaccaactaaacgtttttggtgatcttatcttggttattttaggaattagctctttagttcctacacatattggtgccattagatcatatctagtacgctgttattctccagtaacttctaacctggtgcaacaatttattaaatcctctcaaattcaactacgaaaccccagaatctgttgataggatgtgaagatcctgttttacttcctgtagtaagatatgcatgtatcagatacttattttcttggaaagaattttctagatactgtattctttacatctggtatgcatacctatagctatttgatattttaagtacatcacttttgttggaatatttatacaggt

SEQ ID NO: 14357 - DNA, 1444 bp, Aquilegia coerulea
  Intron number 1 from transcript AcoGoldSmith_v1.000400m (l ocus AcoGoldSmith_v1.000400m.g) derived from phytozome v7. 0 (chr-ID scaffold_37; pos 1853817 to 1855260)
tttccaaccaggtatgtttgattttagcttagttgagacttgagagtgcaattatagctatactcattgtagatttgagtgcaatttgaatatttagttgtcgttgatttgcgattttattgtttgtattgagtagaattgtagtatacttatttggtgcagtatctattgatattttgagtgtatttggatgtgttgttttgattttgagtagagtgtgtagttcgattgaattgaatctgcatctacttatatttcgaggtatatttattgtaatttgatacaggaaaattgacgataaccccccaggttttggtcactcttggcaagaaccccctcatttgtccagttttggtgttaaccccccaaccccccaaattagaccttgtgttgcccagtttacccctgacccctcatatttgagtaaaccccctaatttatcattaagagaagtttactaacacatgttaactccgttaacagaacccctatttgcctaaaccccccgaaaaagtataaaactgaaaaaaaaaaaaaaaaaaacttaaaatttaactggaccaggtaggtcagagttgattttacttttgtttttaaatttttaactatcggggggttttcacaaatatatgttccgttaacggaggttaacgattgttagtaaacttctgttacttaaatttggggggtttagtcaaataatatgtgataggggtatattggacaaaaaatttgctgaagtagggggttgggggcttaacgccaaaaatggacaaatggggggttcttgccaagagtgaccaaaacctggggggttatcgccaattttcccatttgatacacaatctgaatatttggttcaatcaaacaggctataagaaacaccacgcaaccctagagcaacaaagtgactagactttgattactttaatgaacatagttctctatctcaccaaacctcctgtttggataactagttttggctctgaatctaatttccattaggcaaaaaggtttaaaaatacatagaagctacttttataaggatgggtacatggtaaatgattgaaggcccaaggacaatgatagaagaatagaatcgtacagtaaaattttgctgattcaggtactcatcagatgcatctttctccatgtctttccccatctccagatattctgcattttctcatctgaggtcaattgcaccttattataatgcgtgaactttctgtgtgctgatgtagtatatatctagctttccttgcatttcattatttcgtgcaccggacatctggtttatatttattctgggaatctctttattactggagacttcaaaattaggataaaagcccaagatgagtcagagattttctggctgtcttgatgtaggtaacctattatttccagttttgattggatatgtatacattacaggtagaaa

SEQ ID NO: 14358 - DNA, 3443 bp, Aquilegia coerulea
  Intron number 2 from transcript AcoGoldSmith_v1.007426m (l ocus AcoGoldSmith_v1.007426m.g) derived from phytozome v7. 0 (chr-ID scaffold_45; pos 1563493 to 1566935 reverse stra nd)
attgcgtgtcttagacattcaaataacggtaattcgtattctctgaatttaagtttttgttgtagtgtagatttccatttttgttatgtgttgtgcttttagtaatggttcataatgagcaactgttgttggatatacttttttctgtttacgtgttattgggtcatattgccataattcgcatgcgtagttcttccaagtcaagttaaaatgttttaatgtgtttgttcatgttttaccttatatggaaaagatcagaaaaaagacgtcttgatgaaaagtggcacaactataggcatgctgataagatcattatgttagtgaagaaaacagtcagtcaaggtctagttgagaacgtcctaaaaggaatcgaatcataaatgtggtctaaacaaggagttataaacccccctaaaatatctttagatttaacatagactaacgctgaaatacatagagaagaacatgtgggagatttgttactattgaattgaactactaggatccactgcgtcagtaattgcctaagaccttctggtggtgaccttgcatgcactcatcactatgttgcaagatataacaacagggattcttaccctggatcatcatcccaaactttggaactcattgatttgagggtaaactatgtttcaactgagtagatgatgtttattattttctccaaaataatcttaaagaaaatcccttgcaatattttcgtagcacttttcatgcttcgtttctgctggaattgtaagaataaatagatcattacgaggaagttaacaattgttctttatcataattgtttaccatctaaaaagaggagattgttgtgcatgttagctagattcctcttcttaagtttctaccctcttctgaaaaggtgtttcccttccatccggtcttcatatttcatctttccaacacagtattgaattaagaccaacgattcaatattgtgagcttggtacacctagcgtcgggaattgggctatcagtagatatgttatgacttatggcattagcaaactttatttggcatgattaggaccgcaagccttgatgcgtataggtgttaggtgccgagtgagacgccgtcaatactaggaatggaaagtgcaaccttcacattagagagggacataatgctaactgaagacattgttaatgtaatccaattaacaaaatgagtgtgattgtgctgagttgataggtgcatgttgttctttttggattccacgtgattattttacttggtctaatggcttccaaacattgttagtaccttaacaagggacattaaagaaaattgtttgggggaagaaactgacaccaagttttggtttgctaattatgatgagggaaaccaagattaccttaaaattgaacgagtattattatgccacatccaaaaggatcctagtagaaagacgtgtaagtcaaaatctcgtattgtaatttgggattttcgtgttctgaatctcaactaataacattttgactacttaagaatgttgacacaagtttcctaaccatatattgagatgggttatgttaaacatttaaaatcagatagtatattactgtaaaaatcaaatcgaatatcaatgagaacactcgtaaatacttaattgaaactcttaaaacaaagtagaaatcgttaaagtttggaagtgggggaataattatatatacacacaatcagtttccactattccttattttgattttgattgagtttgaaaggttgttttgtgtctattcttggcaaggattgttcatgtgttgaattcgtacaaataaatatgcctaataaaagattctttggtcttgccagataaaaaaaatggctaacatatttatgtcaaaataacatacaactcccaaatacagtacatgagtctagttcatttacgaggcgcgcgagaagaaaatacccttgttgctaacacatatgaacaacagtctaagaaaattggtgattaataaaagtggtgtatttttttcagattatatcttgttagcatcttcttactagtctagacaaaatttcataaataagcctaatttaataaaaaatttaggcatgtttgacctataagacctttttggtaacattgtaacacgcacaataatacgtgcttagaactcacgcgtttgatcaaaccttccaactctatctaagtcataacttttgtatcatattttttcctgaaaagattggtggtggtttgagaatggtccctttcgagtctcttgtgttctttctggaaactgtatattttgggtcttgagagcgttgtcttttctgtctagtagctcctttgtatttgttgccattcaaattccttgtggtatatcaccccctttgtacgttgcacctcattctctatgatacaaattgattttacctttcataaagaaaaaaaagacttgcctctgttacagtggttatcagttcttaaagttctaaccatattagcatccatacaacaatcagactttagaggggactctggagttccacaccattttatattgaaaaaccagatacctagctactggactttaactctcctggtttcaataatctcatacatggaaatatggaattgagagagaattcaacatgctgtccatggtgcaaccttttgtctactttttcattgacttggaatctcaagatatggcccataaactcagacactgctgacgtaccctttcaaagaaagcgtttttggaatttagatttcgtgactggatgctttcttccaagtttcaatcattgtgctgtttggctgtctctttctaggtggcaacgatcacatagagtacattatagagttgtttaaaaagaacttaaggatccttgctaagtcatcgaatccttaaattctggactgagggaaagtagaaatgattatatgagaatctaaacaccctcgaacgcacattaaccattgacatacctaagaaaatgcaaaaacattattataaacttgtatcctttaggtattcaggatgggattctgtgactaatatccttctatgatgactccttttttggaacctggtcttcctttagtatagatctctagtcttggattaatcctggcaggtgatgactcttttcattttagaacaagtggtgttacgcctagcagaacaaaatcatcctaggcagtaaaggccataatttatcctaggcacactttagggagacacattttgatgtaatgatgtttttgtgatttgatgaaataatgtcatgtatcgatagaaattgagaggaagttattctacttattgttgtttctttattttcattattcgcaaaataataataataataataataataataataataataataataatcaacatattgcttattatctctttggcaggatcaccgaacttcactatcctcattcaga

SEQ ID NO: 14359 - DNA, 1111 bp, Aquilegia coerulea
  Intron number 1 from transcript AcoGoldSmith_v1.002144m (l ocus AcoGoldSmith_v1.002144m.g) derived from phytozome v7. 0 (chr-ID scaffold_14; pos 2959711 to 2960821)
caccagaggtatatacatatttattcacacttctgaattttttcgatttacttgtcataaagagtattgaattttctctttactattgttgttgaaaacatgacattctttctttattgaaactttttctcttgtactcgacaccatctttgtttttttaaactgcaaatacttataatttgatcgcaatggttatctgttgcttattaacgcctactcagggaaggacatgcaattttttttttttttttgcttacttggctgattgcgcacattatattaccgacagtcagttagttataaactccaaccttttctactgggcatcaagtgcaaaagaacaaaccaaattccgatatatacacaagacaccattttttttaactttgaacacgaccatcttttccgatctagtatcaaataagtgaataagcgataggttgaaatgacagatgacctttatgacagacccaacagaaaaggacatgattattaagtatagtagtctgctgaattatttttctattactttccttacgcaaagatgaaaaaatccaggtgagccatcctcattagtcatattctgccaagtccgagcttctggctaagatcaatatcagtgataattttagttaggccctcttggtagttggtacggataatggttccctattctcttccaccctcaagccctaaacatgacaaacaacatgagactcaaaagggtatcattctggaagtgaaatattatatttacagatttccaattcaagcagcaacaagacagactaggcatacccatgcatccttatgacaaaaaagaccccgagaacatatgggtgatctcatgcctaatttaaagccgaaattaagattttttccattgttgcaagatatgtaagacaagtagacaacaaagaaaaaaaaattatgtgctaataataagaatacgcttgtggtcatgacttaaacagctgacatacagatttgtcgcacaattaccagttcaagacacttgacagttttttttagtggatgacaatacgaatctggtttatttgatgtgttgaagaagtttcagttgatattctcttgcaggcttcacttgtta

SEQ ID NO: 14360 - DNA, 1142 bp, Aquilegia coerulea
  Intron number 2 from transcript AcoGoldSmith_v1.027103m (l ocus AcoGoldSmith_v1.027103m.g) derived from phytozome v7. 0 (chr-ID scaffold_133; pos 23769 to 24910)
tggctggacttctaacagcagcatctcctgttcaggtgttattctttctccatgctaagtttttgattgcttttccatggatcattagtggttaactataactatcctggatttgggtcgattcagatgtttatcttgtcctctagtctagactttgtttagttttatgcccccgtaattaaattaatctacttgtttgtctttgaggttcgaaagagcagttgtctgcttgggtgttgtaaacctgtatgtgaaaggtctggattccacttgggcttgcctggggtcacactatcaaaccataacagcagttataccctggaccaagttccacagatttgagaccataacagccaatggacagtaagaataatgaagaatgagaccaactcaccttggtactgtttggatctcgctcagacaatgtttcagatggcggattactttcaggagatttagcttcaatcatgtgtttaggaaagcaatcatgcgctgattacttagcttcactagggtgtgtcgagggaaacaatgttatattttttgaaccacctttagatgaacctctgtataggcatgtctgagatgatatgataggaactgaatatgtaggactataatttttgatcaatcaacaggtgggggtctgcctaaccccagcttaacttgcaaaaaaaaaaaaaaaagttccacagatttgtattggactaaacctccttacactgtgatatggaccttatcagtatagttagatagatatactatcggcgtacaggacttccggtcgtttgcttaccttcaccttaagatgtactttgcaagtactattggcttttgggttaagatctagactgttgtgtggtttgacatttcttcttgtcactgtaataggctcttatgtgtacttagagttctacattttgtagcttttgttacagtttgcctttaggttgtctcttatttgttgatattcaagagagggcaacattgcaaaacatataaaatgaaggaaaaatattttacatattacaagtaaacttttaacaccgtgttggctgcaaattattatactacacagaattatgtatttctcatacaatttgcttttccttttcaggtggttgtgggtagttttaaagcgg

SEQ ID NO: 14361 - DNA, 1938 bp, Aquilegia coerulea
  Intron number 1 from transcript AcoGoldSmith_v1.011999m (l ocus AcoGoldSmith_v1.011999m.g) derived from phytozome v7. 0 (chr-ID scaffold_6; pos 2295674 to 2297611 reverse stran d)
caagggactatttaaagagctatccatatatccaggtttgtagcttagtttcattcaactatgcattttcatatatatatatacacattgtcttctaatttgtttgcaagaaattagagtagtggaaacaattggagcacaaatttttatagagattataccatttacacatttctacccgaaacaattgtgacgacataccctttcagataattgcaactaataatttaaatattaaccaatcctcttaagggggggggggtataaatattattattattccagcccagcttggaaacaacagtgcaaagcttagaaactgcatttctgacaatataattaagcgaattgactagaaccaggtacgtgcgtaaacatctttaattaaaactgtttattatggatcaagtaataaaacaaacactatagctttggtacaggatgcactcatgtgacaatggattggctgtaatgatgatagcttacatttaatcacacaacaacaacattggtaaagacaccatattatttaaaaatggatacaaccaaatcaaaataagtcatagctcagcctttgcaattttcatgtacaagcaactaattattcttgttacaccatgtcaccagattactctaccttccatgttgcagttacctattgtaaattgtctatctgtaacgtaaaaccttgactcaatttgcatctgaccattatctgcaaacttccttcctttggtgtttcttgagatgagaatggtcgctttgatgataatatcgatcgctcaaatgaaaaccacctactgaatgattgcaaaatattaacctatgctctaacatacatttatatatctgatattatatcaggcaccgtgattctaatagttgaaggatcccatccaataccagtactcccgataatagattccaagtcatgatactgatcaactactgtatgtaattgagtttgttacacacttcttgcgtacctatgaccatcccagtattcttgaacgtagctgttgtggagctgaagaagacatatattccagttagttgttaatttgttatatattttcaaacgctatgcatgggtgttacaatcacacgagtcacatgttcttactttgagagctgcagaagatgtgttatatgcttgaacaaagaagacgtttttataaattaatcataaaaatgagaattctcaggcaaacaagcacaccatgtgagggttctagcaaggatcccctatattgaaattctcatggttctagcaagaatcctcattgttcaccagacagactaattctcacagagggttctagcaaggatcccctatattgaaattctggcatgatgctaaacatacctgtattatctttatatgtagttcattcaatcattgttgtgatttgtgaattgattctcgcatgaaagagtagcaaaaaatgttataagaattaagaccaagttagtagatcattctgtggtttatgtatttgccgtatgcaaatctccaaactaatgaggaggaagtattatgttgggtatcaaaggtgtgcaaatttccaaaccagatgaaagtattctgtttaatgccaggtatatgcgaattcccaaagtaaacaaatgaggaagtattctgcttgggttatgctcagttgttcacatgaggaactttctcaagctatattttcctattcaaaaacgttattttcttataaactctgatattttaatatcatatttcatgctcaaacatgttagtctgaattcttttagattgaattattaaatgttaggatgtcacatttgtaaaagtccttgtctttgtgttttaatccaccaccattgccttctcaaggatttttaatcagaatgatggcctattcttgcgtttggatgatatattaatcaatggtctttaatgctcacaggttg

SEQ ID NO: 14362 - DNA, 1754 bp, Aquilegia coerulea
  Intron number 2 from transcript AcoGoldSmith_v1.008034m (l ocus AcoGoldSmith_v1.008034m.g) derived from phytozome v7. 0 (chr-ID scaffold_40; pos 2154415 to 2156168)
tggtgagctttgttttactctgtaattaaatgtgtattgtagttaattattgttttactgatatagtactatgagtatgttattctactttatgatcagcctttgttaatgatgcgatattttgagtgagagtttgtagcaagtttttaataactaaaacatttggggaaatcatcgtgcaacatcattgtacatgttgtcatgcaaaaaccatactaatcttcgctttctacttttatcttaaaatgaatatgactgaaaatcttatttgaacatctaactgtcttttgctgctaactgccgtcatcatcatcataatctagacttccataccctaagcatgcatctaactaggtacatatttgttcttgagctgctatcttctatactgctgttatgatgtcatagtcacacattaagcatgcatctaagtgtagtatgctttctgatatatgtcattttgaacttgctggtgtgcatgttcataccgtgtgaggattcgttgtcagaaattattagtcacatgttcttttttattggctctacattgacattgttgaggtgtccttgagtatttgtttctgcttgcaaagtttctatattttagtactatctgagcttaggagtgagtttcatttgatttcaatgagtctttttatgtagagttttgtcttagcattttgtggttggattgttcttctacttatacttgtatttgttgttgtgacctgcgatgtttgcatagtaatactaaactcttttacgaatatattatgctagtttacatctcaaaagaaaaccccttttaaagaggcaagactcaatgagtggtgagagtatttttctctttcattagtgcctactgcctactaaggtgaaagttcatgtgttttgtttccttagaagattgtaggtcataattgtaaataaggttcacaaaaatttcctatcatttgaaatgtaagagtaagactagttttgtgaatctggatttgagataatggacttagtttcatttgatatcgagggttcttttgttgaacatttttttaaactaggcaagccttaagagtgatgagaattttcttctcttcccagatcccagtagtgcctgttgaggtggcaagttcatgtgttttgttttcctattgattagattgcaggtcatgaaaatttcttgttattgtatttataagatattctgcatttgttcatctaaaaacatacctggaatgtagttatacatactgatatactagtagtatatgcttttatgttgtgcattgtggtttcatcatatttaacctcccattgtgcaatttcatgcccttgttatatttatagttattaccaaaaaaaaaaaaaaaaaaattatcttttagtctattgagttttcaaatccacagtttgttttatcccaaatcatcattatattggtttcaaccatgaaaggatattattgctctttcatcaaagatcattgttgcttaattaccatgttaaaaaactgaactgaagttgtctgtagtatcccataattggcatcctggaagtctaattatgaattatctacaaccctttcaaccatgctaacaaagagaagaaaagaaaatccacaaatgctttgtttcttatgattctaatgtttgtcctgtggctttgagtgttttgagcttgttatgcaaaccaaatcattcaaaatgcgtctattagactctcctcttacaattcaatttaatttcaggttcaggccc

SEQ ID NO: 14363 - DNA, 1074 bp, Aquilegia coerulea
  Intron number 2 from transcript AcoGoldSmith_v1.013897m (l ocus AcoGoldSmith_v1.013897m.g) derived from phytozome v7. 0 (chr-ID scaffold_1; pos 7791149 to 7792222 reverse stran d)
tgggcagaaggaaacccaaagttgtggtaagagttctctatcttgtgtcttatatagtggaaagtttccaaaatgtattaattttcttttgtatgcttccactaccaaaatctacaaaggttatgtgaattcaataaaatgtcttttctattacggagctacaaacttggatttgattttattccgatggcatgattatagagtgtgattgatattaggtaagcatgacactcttaacctcaggatccattctgatcaaaaggacccaatctgtatgtgcattctggttgatgagctcttattgagtaaagttatctcgaatcctttgagctgcccccttattggtcagttctttaggtgcagctgtgcagccacaagtttgaggagtcaactgcaactatttccttttattttattttattttgctgtaggggaaaactatacttttgtagtgccatcagtggggatgcttgtcatttcattaatcttttgttaactggcttgtttcaataataagtcacaaggactgataaaggttgaagacttacatagagtctgcttaaccattgtaatggaggacaaagctaatgccatgaatcagcaaatataaggagaacagatcagggtttccctatacctaaaaatcttcagaaaaataaaaggactcactagtgactcccacaagatagagtcatagagagcacgatcagaaacttggaatgcttaaagtgttaagagtcgggaaagaagagtccctgcaagcaaaacaatagtatgtacaggaccggatgatctaacatacatttctagttttgattgatttcattctaggattctctaagtaaaacctcgtgttttgtttaagttatgcaaaggagttgttttgacatttataaatttttcaagaacacgtctgttgtaaataagtatacaaacaaaaacataatttcttcctatcaaccatggtttattctgctagtttgtttcttttaagttattgaacagataatgatttatttcccttatgattttcatttatcagtgaaactctgcactctgttgctacgaagttgc

SEQ ID NO: 14364 - DNA, 828 bp, Aquilegia coerulea
  Intron number 1 from transcript AcoGoldSmith_v1.018854m (l ocus AcoGoldSmith_v1.018854m.g) derived from phytozome v7. 0 (chr-ID scaffold_27; pos 2735638 to 2736465 reverse stra nd)
tgcacctgttttcagcccttctctttgtaacagttggtattctttcttacccttctttcttattcatgcatgttattaattagtctataaattaagaacacttcaaactatttaatttaatcaagatctttgagtttgcctttgcttcattcagggtatttaatcaagatcttcctctccggcctctgaatgttttaagaatgaatcaaatactattaaagatggttttcgtcttcattcacattgcaaaattcttttggtaggacaagagaaataacataaattcacacacaaggcttcttttggtattcaaatcaatatataaaacccttaccacctatatttttgtaatattgattctaaatgttcttgtgtatttattttttgtgatggaattcactattctataacattaacattgcatcatatcacatattgatttaactatatgtttccaaagtatgtctaagtactcatttcttctttgacaataatttgtcatttttcttattttggaatttgattctgagatttcaaacacaaaaatctagaaaactttggtttatatacaacgtaacagtggcacaatcccaaatcttacttgtcatcactttctcttgtttgtgttcaaacaattcaaaatggttattttatttttgttggattctactcagtagcactgctcactgcaccatatatctttagagtaatgtggatgcatggttattttctttgtgacagaaagataaaaactaagtactcctgttttgttttgtggttcctctgttttcagttggttacagcccatattacataccacagaacacc

SEQ ID NO: 14365 - DNA, 1777 bp, Aquilegia coerulea
  Intron number 3 from transcript AcoGoldSmith_v1.011018m (l ocus AcoGoldSmith_v1.011018m.g) derived from phytozome v7. 0 (chr-ID scaffold_1; pos 4340490 to 4342266)
cttcccctatctcgggtaaccttgaggttcgtaagtaaattttaaggttttctttcttatctgtttcttgaacataatgtgactttactagaaatctagaacatcaaaaattcaaacacatacacaaaacaataaatacatagatcaacatttactcatcattcagaagttgacctttggaacgttgaatggaattcttttttatcttcttttacccgtaacagttagatatgcacattgaatctgtttaaaatttgtcattcactgccagcatactgaaaaatacatgagagctgcacttaagcaatgacaaataaagagcacccaggaatcatttgtaatagtaagcttgatgtgcgtgtgtgaaaattgtgccaaccacatcttttattgaactttaacgcaagcacagcacgtgccattatcaattgctttcaacatatttgtgtctacaaacagcaaattctaagtaagaagtaaaagaaaatactattaattttcatttgccaattgtcattagagattgcaatctattagaaaattgcttctgcagtttgatatttggacatatgttgtttattgtaaaccttgacattcgctattaacttattactatctaagagttgcttcagggtccttttcttttcataatttattgttgaaacttgaattagcgttttcacccaatatataagttgtatatcatttgtgatgtctcaccacccttccaaccatctttattcaacatatactcacatagtaccgatgggcccaagtacatagatcagctgtgtaagctgataataagaaaactgaaaagagtgatgctctctaaagccaacaagtagactgcccagcatattcttagggtattattttcctaaatccatagtgtgggtgctttggtaaggccttaagtgaagggtcttgctttcaaggccaagaagatatctacaattttaattgatgtactggaaacactgtatgattggtcaagggggtcaatagggtttatatcctgaatgtttaggtcttgctatgtcttatataatgtaatgaactgacctttatttatattttgctagtcatgttgatgtagttatccttagctctttctggaaaagacttgctatcacatcatagggttttaagttgtccctagtatgtagtactcttgttggtttgaattgaaaattgaaatgaactgtacattatgctgattcaaaaaattaagtggaaaaaggctctcaatcctcatgatatatcatcgttattttgaagtgaccttcattaatacaattttttcatcgtaaaggaaaaagaaatggggaattgaaggcaaaggaaagatcaaaagaatgttgttatctgttggtggaaagttattattttactcgtcaaagaactaatacacactatatcaaagggaaatatgcacctgttatgtgattgcagtggagcataggaataacaaacttttcctctgatttatatttaaaaagctccccaccatcttataggcttttccaggatccgtataaccagatcctatagattgaaattgtcctcagatcctattttatgttacatagctacatatgattattttctagattctgcaaattaaaatggtggtaatgttcacataagctacttgtaatgacatctggcatgtactgtaatagaaacactagtgacatgaaaactagttgtgtggaaatttcatctattatttctaacttaacatgaattatttaggtgagctgttttggtggtg

SEQ ID NO: 14366 - DNA, 1506 bp, Aquilegia coerulea
  Intron number 1 from transcript AcoGoldSmith_v1.026334m (l ocus AcoGoldSmith_v1.026334m.g) derived from phytozome v7. 0 (chr-ID scaffold_13; pos 196932 to 198437)
tttggatctcgatcgctgcaacagcaatctggtctgcttttttctctcctttctttctttctttctttctttctttctttctttcttttactattactatttttttctcattttattatacttctgaaaaccagtgaaatttgatttcatgattgagtttcgtttgttttaatgtgacttgttcctagttatgactaggaatgcaaggttataacagtgaatttattcttcctgattgaaactttaaaaaaaccaactggattgttgtcaacattttgaatcctattcaagttcattttgttgaggtctaaaccttatatcctattcaaattaaaacttgtatccgtcttgttatggactttttggggtttcctcaattccccaccgagagatttcaagtcattgggtcaacggtcgtctagcgctaataagctcagctcttttcccaccgagaaacagaagggagggccatctgctaaacccagccaatgcccgcctgaactcaagactggtcacccaatgctttccattgatttcatataccaatcccaatatcttaatttcgaatggcaatacaaactaaactatttaattaatgaggcgagtgaccgcattccgccttctcgtataaaaagcgagaccagctctgctgacttagtgatgcgcctatagaaacagaattgtttcctccttgaccattgcttcctcagagagagatagacgaaatcatcctctagtgctacttctggctagggtttggtcaggtttcctcccctgaaggaatgagccaatttccccttctacaagaagaaagagaagatgagaccgaatcccccgctggccatcggggacccagtggcttctagtgactggcttttgggttttgttcccggccaagctttcgctttcgtccgtgactctatagttccacccgttaactctcgacattgtttgcgaacaatgtccaaattttaattaaataaaccattaaaagataaaatcagagtcgaatttctatgcatatgtacagataagttagtcacatttacttttaagtcatccaccctaaatgaacatttgtggctcctctactgggtggggagtgactagtttaaattcttaggttcaaatgtttgttccttgttcatcctttcatctttttatgaagtctcagggaaactatttcttcctatgaaggagctgatttgagatagagtgactctttttttttaaattgatcccgaaacatgaaattttttggcttttattattttgacaatttagactggatgttgccatcaactatctaaaaaatcgaattcatcaaccaagatctaactattcactgtgaagccttagtctttataagtctatactcattaaaatgcgtcctggctagcactctttagttttaaacaatttgtagttggaaatcaagtgactgaatcatacaagtgctcaagacccccagcttattgcattattgttttgtgttttttctgaagg

SEQ ID NO: 14367 - DNA, 2048 bp, Aquilegia coerulea
  Intron number 5 from transcript AcoGoldSmith_v1.010619m (l ocus AcoGoldSmith_v1.010305m.g) derived from phytozome v7. 0 (chr-ID scaffold_22; pos 3359205 to 3361252 reverse stra nd)
aggtactgctttagcttcaatcttctcttagttttggaaatgtataatctttgtcaattgtagttgagtttgtgttctcttaggagtgtctagcttgtgagttattaaacattaaagtatcagggaaatcagataagatctgcagttctgaaaaccgaataatgatgctttacacttttaccacatcaatttatgaatattcctcaaggataaagtcgagcagagggggttgacattttttactggattgaccaaattttttgtacatttgaaatcttttttacttgttcttagccttttaccacatctagaaaaaataaaacctggtttaattaatgcttagtggctaagtagtcataccagttgttactgtatatgtatgccttttggttaaatagcttaagactcgcacagtgaatttgtaaggtctttgaaactaaaatgcttttagctggaaacgtttttttatcctaaaattactgcctatagaaagtgatatcaggctttatggcccacccactctctctctcaaaatttagctgggcttgacttgcatctttaaaaattagaaatcatgttcatcgaaaccagagataaattcagcagcttgacttgcaatgtatgacttgtgtaagagaggttaagtcacgtccctcagatgtgtcatctgcaacaatgacaacgaatccatccacaatctcttctgagattatggtgtagctatttcagtgtgggcacatattgggtacttcttttggaaggtttcatttcatcatagactggacatagacatgttgaggtggaaggctgtagtttataataccttaatgtattcgtgttttcatttggagatgttgtgggaaggatgtgaaattgatcaatacctatttacaatgaaaggcaagaaattgagaggtcaagaatagggtgggtgggtggggggttccgcatctgtaatgcctctagaattacagattgagaacttcatttatcattgtctaatacagttagattatgctacatacgtagtctgcatcctattattcgtaaaacagtcatgttttttctaagaccaggtgggtgctacaagttacgagtgaacaaaatagaatcgatgatatgcgacttaacaaaaagttttcaaggttgaaaatgtaatctatatgaattgcagtacatgaggttctgttaagccactaactacatgttattggtacaactgttaatcaataatcattaacaatccctttactttcaaacctggtgaaggtgggagttgatccgcaccttgagccccaacccccctaggctgagaacactggacatttttctatcaatccactaacgtcattgacctgtttgtagaaggatgagctgttgaagacatttagaatatctatattaatatttagagtattgataagatggctctagatttaggaaagttgatgccaaggtgtaaactcagtgtcatatgaaatttatttgacctagttcttgatatcgtttctcagagaaactttgtagctgcagtttaattctagctgttgggctgcagcctgcaacgatagtatctgcaaggaaaataatggcaatgccttatcccaaacgttggcaagaatgtcttattattcaaagccatagatttcgggaattaacgttcttttgcggtcactgcctcagttaatcttatctactgtctacccaatttttaaactctgaagaatctttgcctacctaatctggagccatgaggagtttagattctatcgtgccaaactatctaaagcaactattacttaatttaccacctataatggcaagttaactctgtagaattttttgtaatagattttacctttttcttacaactctctagaatattcttttactaaatttacctttcagttttattcgaatggtggtcacatagttctcccaagccataccttcaaagttcaaccatcttatagtgttttattgtaattactagtagattgtatcgttttgggttcagctgttcagcatgttcttactgcagtcacaag

SEQ ID NO: 14368 - DNA, 572 bp, Aquilegia coerulea
  Intron number 2 from transcript AcoGoldSmith_v1.005562m (l ocus AcoGoldSmith_v1.005562m.g) derived from phytozome v7. 0 (chr-ID scaffold_27; pos 1769480 to 1770051)
tagccacattgaggtaagttgtttagtcttattgattaaatatgtttcttttttttatctaatttctggatcatgttgatattatcgtttttgagagtttagtggattgtgttctgtgaggcctttgtgtctataggctccagttggtattctgcaatttatcagatattcagtagtttccgtagttagaatggaagtaaggcgatcaaatcggttattgttaaattggcaattggtctcataagatcaagattacattagagtcacccaaaaccagaacatacataatccaaaatctcatcatatgacttactccaactcttagtttagtatcattcttaaaatggaaatctgtgaagaaaacttattttgtgcgtaggtgacataaaataaacgttgaaaagaggattttagacattcattgttatggcatttgataccactgaggcacaactgttcatgctccctcactactatatatatatcatatatgggatgtgtgcatattatgagaagcatcataactgcttatacattttcatgtcaggatcttgttgatatagaagtcttcc

SEQ ID NO: 14369 - DNA, 4479 bp, Aquilegia coerulea
  Intron number 2 from transcript AcoGoldSmith_v1.011635m (l ocus AcoGoldSmith_v1.011635m.g) derived from phytozome v7. 0 (chr-ID scaffold_73; pos 721620 to 726098)
gctgtgcaacccatccccggagcattgcagagagagtaagtaaacttcatcaacctatattataccatttgatgattcaatgcatgtacaatccttcttaaactttagctatatgcactactatgattgcttagaccttaatctaatcattccactaaagctttgaggtagcagtgaactcatacatttaggctccaattgggtcttgaacaactataacatacaaacttgaactgatttgaagcatcatgtcttgggccttagccatatataggcctctaaaaaatctaggcaccatataagctttagctacacaacacatctgaaaatatgcaaccttcactttgtatattctaagcacctcaaaggccttggctaacataacgtaaaagctctaacatgactttgataatactatatgaatagatagaccaaataaagcttaataaaatcattttacatacaacaattgttcatgttctttcagtttagcagtttaaaaccagtccctactcaaggtcaagttactgaagggcgaacctgtgggaactggaaagcttatggttaagagaaaattaaaaggaaaaaaagaaagatgattagaaagaagctcttatagagctgagtactgagaacttcaggactagagtatgcatggtcaaacattatgatattgtgtcaagagctatgcacatcactagctagtgcctaggtgcttttttttagtttccgtggttttaaacatatttttaagtagtattctattgatgaaacgaccacaatgttacaaaagattctaacactagtgatgcccacaaagtgaaagatgtaatccccaagtagtgcaaatttctaatggataattaatagaaaagaataaagtaaagcaatgcaagagacgacacaatatttaacgtggtaaaaccgtaaaccgggaaacatccacaaccgtccttggaagataaacaatccactatatcaataaaagaattacactcacaatagcaaactccggttaattcaatccctgatattaacacctgcaactacaccccgggtagtcttctacttgatataaccgtggttcacttctcagactctctctgagaaacaactcttaatcaatcaatggagaacttgttggaagggagaaggtgaaggtttccttgcttcacacagtatcaatggacacagtatcaatggaggtggtagtaagattggaatccttagatttctttgtttgtagagaaaccctattaatattccataacgggccttgagccaggtcggcccattccacacttgggcttgtagcttagctccaatagtcaatgaatgtgtcaaccttgtaacctgggggttacaatctcccccttgacacatttcgtgacaaaagactctatgactctaatctcacattacattgaacatttcaagactcaactaatgaaagactatggtcataacgccattatagactcatataaacactcttacctaaacaccttgaaaaatcacacagaacaaataatcttcaagaactcccccttaatgtttgagttgtagagtccgagctctttctcccctttaattgttgcatgcctgaaaaaggaaataaacacaagagtacttggagaaaaaagaaagattagagtcaatatacatctccccatttttgtcacaaatggacaacgaggcgaagacaaccaacaagaacatagaaataaacaaggacaaaagaagaacaaatactgaaaaaaaataggacactaataaatcaagtccgacaattaatatattatcaagatgaaaaacactactactactcaaccaccaaccctaagataaaaaaattcaagaagagcgcttcatactgtctgagcaaataccaaacatgccaccatggaaggagtagaaggcagcagcacgagcagacatctgtttgtatgaaaccacaatatcacctttccaacacttcttcaattccaaggtagagaacaattcttcaagccaccgatcaagaaagcagtcagtaagaagaaattgcttcgagtcatccaagttagtgaagtaggggtagtaagaagaaactgcttcgagtcatccaagttagtgaagtaggggtatcctactagagtgagaatcctaacttgaagatcagagggaagacgttcccagtgattaacacagataaaatcaaaattgaggctaggtttgttgagataatcaaagccatgaggaacaccacaatagatacatactttgtttaaatccttataatcaagaaagagatgtggtacaccatgatcctcataagcttgcaaaaacggatggaaccaccaccaccaacaagaatcaagataagaattggagccacctgaaggagaaaccttttgatcttggaaaacctcattagaagaaggcaaagaagaaagagaggccataacaagatgaatctataaaggactagatttagaaggcaaggagcaaccaatacccgagaaaaataaaacctagaaacctttttatacaagataaggaccaatcatgggcccaaaactgagattagacgaagcccacgaaattgaaaacgacgagacgttcgaaccaaaacagaaacggtttgaaccgacatagacgaacacaaagaaagaactccagaaatcgaaaaacgttcgaaccaatgtacaaaacgtttgaaccaaaatgagtacaaaacgtagacaaaataacgtccgaaccaaaagacaaaacatttgaaccaaagggacacgaattaaacacaaatgttcggccgatctaaacgtcacgaataatacacttagtattcgcgaattatttagacatgccccgtattattgacgtattctatgcattcagaacgttcgaaccaattcgaaatgcgttcgaaccaaacgagtacagaacacgcatttaaaaacgttcgaaccaaaaagaaaatggttcaaacctttttagagaaaaacgttcgaaccacattgaaaaatgttcgaaccaaacgagtacagaacacgcaataaaaagtgttcaaaccaatgggaaaatggttcaaaccaactcgattaaagcgttcgaaccaaacggaaaagcgtccgaaccttagaccagaaaaagaacaattacgaagaaaagcttcttaagactcgaaagtgaaaaactactaaggaaaagagaagcagttgtagattaatcctcgcacaaccaaacaagctataagaacacatcacaaaccaccctgtagacatcacaaggttgtcaattacaaggagcaataaactagaagcgagagaaagaaaattcaatgcacgtggtatatatcatgaactcatttgcagtgggtgagaaatgcaaaactaaacaagtatgaaagagtgcaccacaagcatgattaaactgatctccaagaagaagtaactaacatttgaattgatattgatcaaacttcttcaaatactaaagacatgtgcatcttcacaatactttttgccacatgtggtaggaatctttacctacttcttttggtcattatcatgtgggagagatatttacctccatcttttcactaacatgaggtagggtgtagcctacatctttttgacgtttctcccacacctattagtgcaacaccatgataacgtgcaacacaagaactaacatctcttgagtgcatccgtcagagcatgaccctcacaaccccaacgggtttccaccaaatgcatatgctcacaagacaagcataagcctggggatatagtgagtcgtcgaccactaccgaataaaaacaacacacaaggcaaagaaggcatagtttaacgacttaaaaccacccaagactgagcatgatattccaagcaaatcaatacaatcaagcatatggtacccactaggacatacaagaaagtaagccgtgtaagtgcagatagcaaggatgacgttcatgatacaaaccaaagaaacatgaagtccactaagagctatctagtacattaaaccttgtgattgataaatccacaaaattactacaagagagaagcaatgcactttatgcaagattgaaaatgcgggactgtccacaaccacaataaagcacatagcttccttaagagaagcaagaatggactgaccaaaaaattgcacacaacaaggagagataatatattggtaagaaaaaccacacaggggaaaagaacaccaagcaaaagaagcacacaaaagaataatcagaaaagagcaaaaacaccaatagagcggcgcaaaaaatcaaacctatgactcttgagaggcttagtaagaatgtccgccaattgttgatttgtatgaacatactcaaccgcaatgtccttcttttcgactagctccctaataaaatgaaatcggatatcaatatgcttcgttttagagtgctgaaccggattcttagagatactaatagctccagtattgtcacagaacagagtt

SEQ ID NO: 14370 - DNA, 1333 bp, Aquilegia coerulea
  Intron number 6 from transcript AcoGoldSmith_v1.020803m (l ocus AcoGoldSmith_v1.020803m.g) derived from phytozome v7. 0 (chr-ID scaffold_86; pos 99699 to 101031 reverse strand)
cgagtgcagatacagttagtccggtgtcggaatcatcaattgagcaggacctaaattatagtatggagtatttaaacaacttggaggtaattttcattagaaaaacacaattagtattaatttaaattcgttttttatcatacacttaccactaattaataatgtacaggtctctggtgtccccaaccatttgttagaattaaaagttggtgtacctgtaatgcttatcaggaacatcaacccaagtaaaggattgtgcaacgggacccgattattagtaactggattggagccaatgctaattcgggcaaccatcataacaggtagcaaaattggaaacaaggtcactattcacagaatcatagcgtcttcggctccgacaaagtgggagtttatattgcgaaggaggcaattcccactaaaagtttgcttcgcaatgactatcaacaagagtcaaggtcaaacgctacaacatgtaggtatctatttacctcggcctgttttcagccatggacaactatatgttgctgtttcaaggattacaacacgtaaaggtttaaaaatactgatcacgcaagaagaagatgaaccgataggttacacaaaaaatgttgtgtaccacgagatatttaatggtttacctacaggtcagcaactttctttgtaattagttcccttctcccttctccctgctctaaattttacttttgtgtgcattgattctttcatttttcaatatctaaagattaatactttagcaatgtgttaagatttcttttcgtgtgcactttttaataactgtttacaatgttattttctcatcttcctaagtgtatgtatatgagcaggcacatcattagatgaagaccaggaaattcaggtgtgaatctgcacacagagaataatgcctttttccattaagtcctgctacatgttctcccaccatctactaaggttgatattcaaaagaagaagcattaagtaattttatagtactttagttataatgaacttcatctgtaagatacttatataacaatcaaacatatttataatctttaattctagatattatcccttgataagttgacaaactaagacaattttgctcaggttgggagcaatattcgtggtcatgttcacaaagttaatcgtgagctcgaaggtaaactgtcgcactaaagagggatcgtttcattgctcattacaagaacgttgtttcaatgcccatccctaccgactgtgataaaggaataaaactacacattgaagttttaaaatcttcctgaatttttaaattttgttcctagctttacatagtaggtaaagttat

SEQ ID NO: 14371 - DNA, 2625 bp, Aquilegia coerulea
  Intron number 1 from transcript AcoGoldSmith_v1.004587m (l ocus AcoGoldSmith_v1.004587m.g) derived from phytozome v7. 0 (chr-ID scaffold_21; pos 3327613 to 3330237 reverse stra nd)
atcttaggtcttttggaaatattggcagacctcaggtgaatattttatgcttaacttgtgacttttgtttgctaagaccttcattgaattattactgtatttcaatttcagtttgaatatgttagaactgggcactatactggcactatatccatcattggccattgcatgtctgtgtagttattctttcgttatttcgttgtccaaaatcttgtgagttctagataatatatgttgatctgcataaagatgtcgggtaggcacaatatcaaatatctaccaactgtgtatagacatgtcacaactcaaaaaaggttagaaacaaaaagataatttgaccctatagaaaataagatgcttacatcatccaatagggcgtgattcagagttgcctcctttgatcatactatggaatagcaatactgtatcttgattttgacgagacctgaactttcttctgaccgtctattgcactgctttctcttatttgattggtgtctattgctctgctgatgaccccctaagtttacattatccaaggagcactatttgggcacgacctccaagttttgactacactgagatgagagaaaaatgatttctttccaccctattctgtgaccttatggatatgtcatgtatggggaacctcaggggtgaggtatttaactgatttgggtacgatgctggtggatcaaactatctgttagttccttggaggtggagaattgatttctaatgttatgatgcatttatgatacaaactttatgtttgcgaaaatcaacatctaatgagtattttatacaaggtctagcttttgttgcaatgtatatctagagttcaaaattttcaccaacccaaaagtgttgtttcttcattaattttttctgtgcccacattttttttgttaaagttttcttataaaattataatcctcagtgtgttcatctgtaaagtcatgtatcaattgtttgatgaattgttcaattgaaagattctctttggaatgtgtgcttgagatatcgacttggatgtttagcaaccaatcttcattcctaaatctcactgaatttttttattacttacccacgcagaaatgacatcacaattaacaaggtcactacaaaatctatgttgtgttttatcgtttcattgtatcctttggatctatcatccatacataataaaattttacaaaattataaaattattagagcaataactttcaatggcagttaaacactcattgggctaagcttgtttcaaaaacgacttgaatatcaattgtttttaagttctgcaactgctggactgttgcatcatatacatggttaagtaatacccgctaaacagagctgaagtgaatagaaaaagcttttacttgtgcagtgcttcagaaccccctctctgtttctttatttgttattgtgtgtgtgttggtgtcgaagtccagtcggcttaaccttacgttaatgaagcattattgcttgggcatctcctttcagttttaattaccccaagaggataaaaaggtacatctcttccttgtatcctgtacaagaaacctaatgattgaggacttcatgaggttttgttggcagggtggttgaaacatggtttctttcaactctgtcgctagagagttggatttttgtatcgtgcatttaaatcttctttgcgaggtcttgcctttagatggatcttcatatcttgaaaatgtactattttctattttagaaagggatatatattttaatattctctatttttatttctctctctttcctttatttcattttatttatatatacaattataaaatgtttggggaagtcgtcatagaatttttgggttaatggcggagacttattgatatgctgtggggtctgaactgtgttaaatgcatctatatatctgcctagtaactcacctgaaagcattaagagtattacgttaaacgatagttggtggtccttatggccaaagtatgatgagtttttctatagctcttattcattcctttcagcgttgcaaaaggtattaaataccattttcaagaattttaattaaggcaacattaaagcttactatatatactttctaagctgttgtgttagtaatggtgtcttttcacacattctctatgatcacacacacttctctatgcacttcataccatctttagacacacacacacacacttctctatgcacttcataccatctttagacaatgttcattattcttgatcgattgatttcatatatgttttttgaatgcatcacattcctatgattcattgactgaaatttgttcctgaactgttttgccgatgccaaaattagaaaaaaatatttattgctaaattttagtaactgttttgcttatgccaaaattagaaaaaaatatttattgctaaattttagtgtttgagaaatgtcctcttcggaaaggcatggttcgcattttgtttttcatttatatttatgcatccttgaaaaatttgaatgaattatttgtgaaaaagaaaactgagggaactcccattgtaaaacagatttaatcagtatttttttcatacagcaatttgatgtctattctactggatgcaggcagctgttaat

SEQ ID NO: 14372 - DNA, 917 bp, Aquilegia coerulea
  Intron number 1 from transcript AcoGoldSmith_v1.026955m (l ocus AcoGoldSmith_v1.026955m.g) derived from phytozome v7. 0 (chr-ID scaffold_18; pos 1264569 to 1265485 reverse stra nd)
aagctgttgcaaagatcattcgaaaacctgaatctgtaatcaacttaaacttaaacccccttattgctattaaattgtttctactaatatttttttattcttttttcatgttgttgttgttgttgttgttgttgttgttggtttgaatataaagtgtttgatgattttactatgagaaaacatggggttttactgttttagttttgttttagctctttgtagtctaatatatgtatgcaagaatggtttgtttttttattccttcctttttaaatgattgggagaaaagaagaaaaatatattataaatatgacgcatagagtagagtcatagtccattacattgtgtgtacacttttcatatcaaagaatctgcagcagtatttcgtaaacaaaaattatgatctaattagtcatatccactattatgtttactccgatagaacttgctacaactgacattgtctgacaaggttgtttacctatttactagaaccattttctagacttagggttcatcgttgattgaagaatagcgtaaatagttttcgtctctaaacctaataactaataaacgggcagtggatatacattgccagctttctacatgacaagatcctttggatttgtatctatcttaataatcttctatcatatcttattgccaataatttgcccatgtactagaatctcttggattcattttgccaatacattttttttgataaactaaacaaaaggtggacatgaacgatcctgcaaacatagtgtcatgactcatgagagttgagtaatttaaaatttctaacagtcattttctaactgttgacacttgagaggttccttgttcggtcactgataattttaacagcaaaatttcctgaacttatgttttgatatgggtgcttatggttcagt

SEQ ID NO: 14373 - DNA, 3589 bp, Aquilegia coerulea
  Intron number 3 from transcript AcoGoldSmith_v1.009838m (l ocus AcoGoldSmith_v1.009838m.g) derived from phytozome v7. 0 (chr-ID scaffold_35; pos 910302 to 913890)
cggtaattggaattttatattcatttataatcgtgttattatatttgtgtcaggtatatgtcattttattcacataaaaattatgtcatcttacatgtcatacaactttaatgtgtttgggtttgccttttaaatgaatttttgatgcatacacaaaggagtacgaggaagatttattgaatcaatcatgaattgttgatttcctatcctatttgagtagaatattagggtgaaaagttatagtctcaatgtgagacctaacttgaatatataaggaaagaagtgtgttagggaagtcactactattacaagtgtgttacacaagtcactactattacaagtgtgttagacaagtcactactattacaatactcccctcaagctggtacgaagatatcgcgaagacccagcttgcgaataaaaatttgaagatcagtaggacccactgatttcgtgagagtatcagcaatttgtgtcttcgtcccaacaaaggatggagacacgataccagaacgaaccttctctctcaagaaatgcacatcgatctctatgtgctttgtcttctcatgaaggacagaatccgtagctaagtaaagtgcagatttattatcgcagtgaagaacagaggatctagtctgtgtaaaacccaactctctaagaatagagcgaagccacataatctcacaagtacccaatgctaaagcacgatactctgcctcagacgatgaccgagagacaactgattgcttcttgcttttccatgtgataagatgatgtccacgaaaagcacagaagccagtagtagaacgaccgtcaatggagcgaccataatctgagtctgtgaacactccaagggaccctgtggtccagatacataaaaaaaacctaagccaggacacgatttcaggtacatgagaatatgatcgactgcatccatgtgagactgacaaggtgcatgcataaactgactcactctactcacggcaaaggctatgtccggcctggttagacaaatagatcaagcgtccaacaagacgctggtagactgatggatctggtagaggcgctccggcattggcaactgacctgctgttaggaaccagaggagtagaacttggacgacaacctaacatccccgtgtcactcaagagatctagaacatactttcgctgagataaggagatacccttaggactacgagcaacctcaatgcccaagaagtagcgtagaggacctaggtccttgacctcaaaggatttccctagggattccttaagctgtacaatgcctgcagtgtcatctccagtgagaataatgtcatccacatacacaagaagatatatacgaccccctgagttattcttgacaaagactgtatgatcagaatgacacctgaggaacccatgttgaagaataacctcagaaaatttacagaaccaggcacgcggtgactgcttaagcccatataaggacttatggaggcgacaaaccttcccaacatactcctcgacagaacgaaaacctggtggaggatccatgtaaataacctcatcaagatcgccattaaggaaaacattcttcacatctaactgatgaaggggccaatcatatgatgctgcaagggagataatgagtcgaacaaagttcaacttggctacgagagcaaatgtaacgccaaagtcccgaccaggaacttgtgtaaagcctttggcaacaaggcgcgccttatatcgttcaactataccatcggctaagaacttcacattaaagacccatttgcacccaacggtgcgttccttaggaggtaaaggaaccaactcccaagtctgattctgctcaagtgcaaccatctcaacttgcatagctgctatccaatgaggattttccatagcctcatctacagtcaggcccgtatttgggcctaggcgagctaggcaagtgcctaaggccaccaaaccataggggcctcttagttcttcagcccatctatcttttatctgttaggtttttacttttttgtaagcccaactcttttttaataaaacaaaaaggatttgaacctattgtaagcccaactttgcaagcccatgttttaatcaaacacacatatgaggcctcctttcaatatctctatttcttttttcggcagaaaaacctaagtttaattgaaaatagaaaatttccttgcaattctaatgtagtatcaaagattatattatcttttgctttatagttttaattatatacttcaaatttatcggatatcatgtaaagttttcatattattccatacaaatgcaaagggcctcactgagtcactgccaagtgccttccagacttccagtatatacaaaaaatctagggccactaaaatctcagatacggcactgcctacaattctaggaatccggatcaatgaagtagaggtaacatatgcctgatagctagcagacaagctctgataccaagtagaatattagggtgaaaagttatagtctcaatgtgagacctaacttgaatatataaggaaagaagtgtgttagacaagtcactactattacaagtgtgttagacaagtcactactattacaataatttgcaacaaatcaacaatactatgtcatgaatcagtcaagacgttttaatacttaccggactacttaaaaggaaggccatatatgatggagttgttacaagtgtgaggacaaacagggagtaaataagacgagtaaaaaaaacaagttaaatagcatgcgatccatctttagtgtgagcattcataattgcatgttgtagggctcattgtagggatggcttcttggtaaaaactgatgaataagaaaaacctgtcatgcaagtccatctctgtggggcttaatatataggtgcttggttagaggacctttctctctgtttcgctgttgcttttgttgaggattgaggatcttgggttttggtcccttacccagtttcccctggtaaagtcggctttgtgcttcatgaggtaggtctcagttgtgtctatgttttgtactcgtagcttaaccatgggcatctcctttcgtatgaaaattcttgtaatagcaattagattattaccttagctgaagaaaactagaaaagtgcctcaattaatctaattaagggttgatttgagggaacctgattattagatagaaactctaaacctgaatgatacttaagtgggtaacttgtagcaattttttgaatgtcattacattggagaacttttttgattttgactggggaggatcacaatgggcttttgatgaactcttttgatggacccactgatctgacactagatattgtgaacagtataatttttttatccatatctttccatgtaagcaaaagaattgttttgagcaagacaactgatctataaaaacactatcttgctacaattttgtttttgcccctccctttgtgattatacagtatatattggatgtgaattaaatgtgacattccttacagtttcaagcatgaacttttttagatttgtgattggaaacttattaaatatattattcagagccagctagcccagaagaaccgaaggttt

SEQ ID NO: 14374 - DNA, 1482 bp, Aquilegia coerulea
  Intron number 3 from transcript AcoGoldSmith_v1.006458m (l ocus AcoGoldSmith_v1.006458m.g) derived from phytozome v7. 0 (chr-ID scaffold_54; pos 1523429 to 1524910 reverse stra nd)
gccatctggaatcgacaacaccgtgagcacatttggtaggtgattctattcttctatggattataatttataagataactatctgttttcatcaaccttttttttgtgaagcactactcccaatacacattttttttatccatgtcgatctccatataagtaacttaggctcgatatcttgttccttcaatttcatccaggcatttatcttcgtataactattactgtagcatgaagccaaggacttttagagtgtcttagaaggacatgttagtgtgtcaatactcaatactcggaatagggttagacttttctgcttttatgtttgtgtttggatttcatgatgaggtttgaaagtatataagagtttgcaattttacaatgacctgaattgccaaatacaaggttcataaatcatgactggcagattacacctgaaaactattattcccacgaattgaaaccatattcgtgatgattaattcattgtcaagtagtgtaatttcgcttgtgaattggtatgcacttgcattctcaaaggttttgacctttccatccgcttcatcattcatgccattacccttctcaaacttttcttaaagtcttacgagttttcttttatcacaacactctagactccctttcctcattagtgttatctctcgaacaagacagctctcaaagtctacaaaccatacactgcaagaaaaatagaaaaacaattacagaatctatctttgacatattaatacaatatgtatatgttctttggatttgatcttgcaactaatttggaaaagatattttgccttattctaacctatgaagcacggacaccccccttaatctcacgcaccggtgtcggacaccgacactctccggacaccttaggacacgtgtccgacacttcaaattaagtgtcctacttcaaaaaaccaaattttcaaatttggacactgccagacacttcatctggacaccttggcttaaggattactttgtaattttagcttttacaatgggccagaagatattacttacaactgcaagaggcataaactaatcaaaatagaattgggtcaggaatagaataaacaaactaaaagatcactacttctccagaaacgtctcgctcaagtctcacctactttcgcttcatcttccttcaatatcaactgttattctttgtttaagtttacttctcttgtattcttcatctttctcaatacattgttgcttctctagtcaaattaactttgacaaatgacaatgccacattgttatttgtacactatattgttatcctctatgaaaaatattgtatggctaaaaaaaaatttaaataatgtgtatattataacgtgttggtgtcctacattttcaaaaaattacgtgtcggcgtgtccgtatcgtgtcgtgtccgtgtccggtgtccgtgtccgtgcttcatagattctaaccaaggtttaatgtacaggcaac

SEQ ID NO: 14375 - DNA, 777 bp, Aquilegia coerulea
  Intron number 11 from transcript AcoGoldSmith_v1.005359m ( locus AcoGoldSmith_v1.005359m.g) derived from phytozome v7 .0 (chr-ID scaffold_27; pos 2133691 to 2134467 reverse str and)
agggcagtttggaagcttcctcgtctccaagtaattatttcttttgatgttaaattattatgaaaatacatgcaccagatgctgcaaaaacggctgatagtgaactgatatactggacaaacaagcatatgtttttgtttaagtaggaaaacatggtgataaatggaactaggaatcattaccttcaagtaaatatcttttttgaattttttttttctgagaagaatttggccacttctgcgctcctttaagatcttacccaattaattctagcacctcaaggaaagttgacgggaaatcgatacttgagtaaacgtatgtcctttattctgtaatttttcaaatttctggaatttgagctctgttcacactggatttgtatataatggagtgtcatccttgcttcctgttccatgtgtgcatagggaaatgggctctacatatatacctgtgagcattcaaccatcctagtgactgatatggtctgttatgttcaaacaccctagacttgttgccttttcatgagtatcaataaatcgagataagtaaaacattataatatcaagacatttgactactacaaccaaagcagtatataattagattctattagcgacaactgtttacctctttagttgaattatgttcctcattctgttccttggttggaataatggagatagttgatgatcatgtactacttttttcattgctccattgtctataacaatttacactctgtatgacaattcgatggatgtgtggcagaatctggtg

SEQ ID NO: 14376 - DNA, 2363 bp, Aquilegia coerulea
  Intron number 4 from transcript AcoGoldSmith_v1.002135m (l ocus AcoGoldSmith_v1.002135m.g) derived from phytozome v7. 0 (chr-ID scaffold_7; pos 2955716 to 2958078)
gaagtgcagcctcatgtatgtttcttaactctctttgagttatacttatctttctatactgctaaaatagttgtagaagtgttctcaactccataatgggggtgcaatgggattttggctggctttattgatatgagattcacataggtcttttggctgttagacccgatgtgcttgactgcagtcctgaatgtactgtctcactagcagtgttgctggaggattcaatcatttttacattaaattcgtatttgttagttcatatgatatccacctatgtacattcttttttactcgcaatacgtcactagaatataattcactcttcttgatttgcatgaattagttggtgaaacttcaagtagagattgttttagtatagagcttttctatataagaaatcctcgtatggtaagtctactacaaaagagaaaagaacaatcttcataatttaaaggagaccaatacttgataaacatttattccttagctgacctctgagtgttggtggactatggctcaatcattgttattgtcaattcgtatgtgttagtaattatgagctatccacccatggaatttcctctgacttacaacacaccgctaaaataggtttcacactttatttgctcgaattaatggtaagtacttcaacaagagattatattaatacattgattttatatatatatatatatatatatattaaaaaggaggactccttttatggtatgtttacaccaaaagagaagaaaccatctatgtaatataaagaagaccaatgtttagtaaacatatattctttggctgatctctgcccatttgggtgtgttgtgttgcccttttttctcattgtacaatcttctacgagttgtgtcaagttattattttgtgaatatgagctgtaataagttatattagaatatggcttattattttcattttttgtaccctatcattaagcttatagaaatattttgtgcttgagaagatacagaattttaataggataatcacgattatagaaaagctgtatagatataacgtaacctatactattggtaatatgccaaatgatattcttcatcattcagacttgacattctgggaaatcgtagttgaaataatgagactctaaaccatctatgtacctcaatctttggttaaatcattcaattgttggtctcttttcaagaatttttttccaggtttctatattcttttccagatttccatctttttgtttttcaaaaagaatatttttactcttttcccgtaactttttccaaaatatatcgtcccactccttccggatttctgcccatatctctgggttcctttctttgctatgtttccacttcacctatagcttgttgaagaagatgaaataaagttattttacaaagagtttggagtaggaaaaggagattgataattttgcacacagaaattgaagttggaggtgatatgtagacgagacgtctgcgatgccacaatcagtttggctcgcgatagggctaattttgcaacagtttttccatttagattcctgaaggtagtgcacagtttatgagactggatccttggccttgtctctagtagcacgttggtgtccttgatttaacctcatcatgtttggtggatctaattcaagtattttttgagaaaatttgaaattgtggtttataaaatggtggcccagcagtaaatggcattttcttggtagatatgttcttgagtatattatactgtaaacaaaggtcattggtggcaagaacggtagtatacctggcataggccaaatttactgaaaattacggtactgggattttcttgactgccttacttaaaatattgttgtgtacacatccttgttctgtgtttctttacccctatctataatgcttttagtttattttctttgtattgtagtttgcctttacctactgtatttttatttgatttaagaaatatgcatccttactaatcaaaatactttcaatttaagtatttgtatatgagatttgagatgaagacttgaatatatgttgtagaaaacatatggtgtcattagatgtacgtgaatccttgttttgtagtatgaatgtatgatccctaccggagaagcttacttgggtttccttggctgtaaggctgttaatagatactattttatttgccacaaactttgcatatcttttgggaaacgaaagaattagctgattacatgctgtatttaattttgacgtgtgtttattcttcttttatcttggtctgtttttatatgttatgtccctgtgctcttacaagtataaaattttaaacttttctagatctacatagacccttttgaagaaattggg

SEQ ID NO: 14377 - DNA, 2118 bp, Aquilegia coerulea
  Intron number 1 from transcript AcoGoldSmith_v1.003099m (l ocus AcoGoldSmith_v1.002997m.g) derived from phytozome v7. 0 (chr-ID scaffold_7; pos 6726560 to 6728677)
gatcttgaaggacgatcaaactctggaaagctacagtatgtttttattttctctatatttgatcttaaatttgtatggtttatgataactagaaaatttggggtttttgttaaattctagggtaaatttgtgttgtttgttatctcaaatcaccaatcattcattgttattacttgtatgtatgtggtgtttccatgtatgattttgttgaattcaatgtttttttgatgtttattattggtttgatttgattataaaagattcagaatctgtaattatgtacatcagctggaatgctgttgaagatctattatggtttgatcaaaatattgattttttgtttttggagatgattggaggtattagagggttaggttagggcgactgaaaataaattatgccagagaatgggactagtttgatgttcaacagtaaaattggttaggaattatagattatataagtagtgattttgggggatttcagtataaggattatgatgtttagagctgatgtatttgatagagtttcatgcaatgtgtaaatttgtcaacaggagagccaaaaagttaaaagaagtatgctgttaatgattaaatttatgagtgattgtctagtcgcgtgcaagaaaaataatagtacttgtatttctcgccagttattgttttctgttactgaagttaatgctgggaacacgtgttttaatatagagtcgtgaacaggtttaatccagttgtccgctcttaccaagcagagagaatgttggaattttgacagtgtgtcaacgataggaataccaaacagattaagaggttttgttgttaatgatggaatttagatctgattgtctcaaacatttgtatatttagcacttcgagctcccacatgtataatcttttcagttattactcatagttgttgaagataacatatttggtatcgtggagaagatttattttgttacgcagaacatatctttggcgtaatcgcatgcactatctgtaatcaataatagccaagccaaaatgttgagttgtcctatgatgtcaatggtggaatctgcttttatttttgctaggtgtttgcaaacctagtactctatagtaaacctttggagacaccgtattatggtttgtagagaagttttatttgattggaatgtagaagttttctctatatgagtgaatgttggaatctgtaactgtggcgatagtaggtaagataaaaggttaaagagtcatgctgtcaatccaattgtttttgcggaagtttagtacttgcaatggttactaatttagtacttgtaattcattgttgttatctttttgtcgttgcgcaagttttctatttcacaatgccagagaaattatgttagcaattagcattgatagcgttgaagtatgttttagacaggtcaattaccattatgccaatgctctcaacttatgattagcttgtctgcttgtgtcatgtattatcacgctgttataggaaaacaagaattaatagaccacttttatagtaaggtttaaattaagttgaattcctactagatcttattgtcaataactattgtcttggtttgtgctggagtattcatttacacttactctgtatgggtcttaattcacagaataggttataatttctatttttttgggctggtgttgtttacctgttttcctcctcgtgtcaatgtctttatcaacattctctacttttctttgttcgtgagaataaaatttagaaaaaggtacctgtctaagcgtacgaagacgcaatgagaagtttggatggaaaacatttgcacggtctctaggatgaattggagaaattggaaatttcgcttcaattatgcatttgtactttgataccaagttaacaacatataattgacatttttcatttatccaatttagttccgtagtatatttgtacattatatgttgatgtctctgcatattatcttcttagctcatatgtacctttagatgtaagaaagctaatgtacccttttactaattgcgtaaatgttgacgatcgagaattttagtctccgatgttttgattgaatttctgttatgtttgacaggtttgcaggctgatcacaccgtacac

SEQ ID NO: 14378 - DNA, 1108 bp, Aquilegia coerulea
  Intron number 3 from transcript AcoGoldSmith_v1.014176m (l ocus AcoGoldSmith_v1.014176m.g) derived from phytozome v7. 0 (chr-ID scaffold_3; pos 9933536 to 9934643)
catctcacgcaggtaggtcacatggactctgaattctatctgccagggctttttttttttatagttgccctgccgggggggggggggggggttgttttatgatgccatcgtcttttgggatataatgaataatgcttattgatgccattattaaatcattattttggtttcatttttatattttgcatagagtatttattttgctctggtaggaatgtaacttggtgtaggcctgtatcctaatgaggtagccactctattgttgagtttatttccttactgattgtattgaatgcttgtatgctggaactgtacaatggtaagccattatcttgacacgcccccatgaccctttgttttaattgtccctaggaaatgtgtttatcgactttgcactttttaggtaaaccagcaaatacaaaacacaatagcatatatatatatatatatatagataaaacattcaagaatcatggaaataggaagtgtggacgaaaggggtggtgaatatttttccccggtaagtcctcgtgatcttaaactcaagtccatacttcagttgttgaggccctgatgtctcttcccctgccaaagtcctatgcaacccagtatcatttgtagatctatgaacaaatacactttaataaagtcacactggattatggaatttatccttgacttttgtgaggtttcatttttagtggtctgaaatttagcaaaaaatttgcggatccgtctttttttctatctttttctctgtagctcttcaatcttcacgtttagatgaaaagatatatttctggcagagagatgattgttctgttgggttttctttcttcggatgtgaagcaatttttttataaataacttggacaaagaaagttttttcaactattgttacttttgtactacaaaatttaaaagtaaatttgaagtcagttgctgagtgtgttagtctatgtaaattgctttagatttctttgtgtatttgtttagtgtattcgtatcttttttactatgcttgtttgtagaaataatatgcattctcaatttaattttttgaacttttacagagcgttgtaggtcattaaattattcgggagagatt

SEQ ID NO: 14379 - DNA, 2805 bp, Aquilegia coerulea
  Intron number 1 from transcript AcoGoldSmith_v1.007215m (l ocus AcoGoldSmith_v1.007215m.g) derived from phytozome v7. 0 (chr-ID scaffold_21; pos 3710276 to 3713080 reverse stra nd)
gcttgaagacagaatttggggatttctttgtttgggtaagtctcaattatgaattttttttttttccacattttattttaatttacagttcaaaaccctggaattcatcttgatcagactctgatcttatggtcacaatgaataaaaatgattaatttagttcaagaaaacattaaagcaaaataatacttgataatgtaaaaattagctgtttttgggattttttgaatatttccaatagcgggttttataactttttggttcttttgatttgattatagatatattaaattcaagaattttccactgctctacaaaacatggattgccattaaaaacatgttgaaaagtattttaccaagtacacatacagtataattacgattgacgctaatatcttcgtttatggaagggccatagatgagttaagcctcttccacacttctacttaattgaatcatagagtgtttaatttttttatgtgtacgatgaattaatcaagtagtcaacaaaatttccaccaaatctatgcatgataatctcaagtcctcacacaactcagtaaataataaatagagtcttgaaaatatattgatgatattgatcgcggagattccattctaccaagatcgacaattgtgctaattctttgtggaaagttcatgactatccattatttggagttttgggctccatttggaaggatctgtagtgttaccttgtattggttgggtgcaatcttatgtgtctgatctctgatttgaacattgaggctttttgcactcgctcaacgagaagaaatgtgcttattagatggccctgcatattgtttaacgttagattatccttagatatgcagaatcgcctcgagaaaatttgtgcctgttgttgcagtgttgaaactgtaaaacactattatgcaagtttctatatcacatggctgtgcgagactcagattgttgaggcagaatagatatttgggcgaaacactatgaaagggataataaatcatgtactcatgtatagtgcaagtgctgatagacaacagtaatgccaccatccttgtatcccgatagaacacttagttcagatatcggaatgctgcatcaatgtacaattctaatgccaaagaatcctgatgggaatgtctgcttcagattgtcttattagtaagtaactcatgccgaaccaacacaagattaaaacccaacacaatgttatgaaccactaaatcagatggtttaactacttacagaccgataggtagggaccagggattgttctgagaagaaagactagaacattgtttgcaccacctcaatagacactaggttgtcaacacatatagacaaggtgggcctactcaacacgtcaacagtgaatgagtcatctctatctgaagtgtaacaagttttctctccctctgcttgaccatctcttactttgtcttgattctcattttcatacactaaggctcaagctaccacaattctgattgaagacaaattttggggattcttttgtttgggtaagtctcaaattgtttcccaatttatttggactcacagttcaaaaccctggacagtatcctgcactctgatcctaaggtcacaattatttctttcatcaggtttaaattttgtttatttcaactcgtgcttagtttagaaagtccatattcatagtgatctagcataaaccaagttatacctaaagttgattgagaaagaagacatgaaaacagaagagtcattgaaaaatcacacttgttgattaattaatacgattgctatgtataaacttatgctaatgtatgaattaagtgtttaggagttttaaaactaccctttacttctttttgttgaattgtatggattattatctgtgacttgggatttatgattatccattctgtagatttcgtaggtggtaatggttcaccatacactaatttacatagaagcattgtcgaagctaatcctcatttatttttttattggaatggttatagataactagatgatttaactttttcacccttgtgttcagttaaattgtacaaccttctgtccgttatgtctttggcatataatcaccaagtctatgtatatatcttctcatgattgtcatacaactcactgaacgctcatgagatacttgaaaaaaaaatgtcaatgtatatttgaagatattggtcgatgagatgcattcaacgaaaccaagtcttttctttttgtggacagtacatgacttcccattatatggcttcagtctaggagtcctgtaccatgacatgaacatgaatgggggcaatcctatctgtctgacatggatattgggggtttacgtcactccgataaaacataaagtcattaaatgattgagctgcgcgcacccgcagtttacaaacaagtgttaattgcattgcagatattcaccatttaaatcattagattaaatttcatgaagtgcttctcttttttaatgacaaatttatttatttatttcctgctgttattgttttagcaaatagtagtatcatcaagagcaaaaatacttcaccttattacagtgcaagtcccagtgagaagtaaagtaatactaaagatgaactagcataaccttttcatgttcacctgtctcccccaccttatctgcttcactctcatttagttttcaacttatcgcaggcatcaagggaacgctgttgaatacaagatcaccattttattgtgcatcagcgaggcagaagtcatttgaaaatctattgatcttgcaagctgctagtcataactagttaatgaa

SEQ ID NO: 14380 - DNA, 1395 bp, Aquilegia coerulea
  Intron number 1 from transcript AcoGoldSmith_v1.014822m (l ocus AcoGoldSmith_v1.014822m.g) derived from phytozome v7. 0 (chr-ID scaffold_9; pos 6287696 to 6289090 reverse stran d)
tttggcatccaggaacacatcgatctcaggattaagtaagcttctgcttatttgctttactattaaaatccatttataaatttgtttgtttgtttgtttgtttgtgttttattgttttctttgagaattgaattgttgtttttttttgtttgacttgattttgtttatccagtccctccagcacatttgtaaatatttttttttatttctgcgtgttctaagatattgtttagatgtggttttctgattgaagattttgtctaaattgttacaaatgtttaattaaatcagaaaggatacaacaaaaagttgctagtgcagctaacttagagcatcttaagcttgtctactctcatgaacattaagaacatgagttagttgtagatatttttaactcattgaatgcttctcattgcatatgtactatgtattattgaaaaccagcaaagaagttggaaactattcaggcaactataacaacatataccatagcctagtatcactcgtatacctgaatatgatctgctgattgttcaagcccttggaatatagcacaattcttatttctagttttctttccctctgtgtgtatatgtgattgaactattgaattgagttaaaagcaagtgcaaaagcaaacacactgtcataagactgattacgaatgttttgaggcaattcgtgtttgcaagagtaaactttgaagaatacgtttgttctttccaacttacccgttcaggagatgctcctaaaacttataagcacatggttggattacatcattatattacgtagctgtatcctcacgttgtccacccgcctaccagcacatacttactcttacaaaaatagaaaagaaaccttaagcaatttttttttcaggaccttttgcaatttcttctttgaactttaaatttgactaggtctttttgccacttttgttaacagaatgattttactcagtgtgcctctgttaaaagggtagatctgtagaatgatctgtagcatctgcatctcgtcttttgcatttgatgtatatccttagcttgacattcttcttttgatttctccaagaacattctttgttactattggatcgttttcttataaaaatatgatctttctgagtagttgtataatcataatactgtaacttggaagcaattgatctgattagatatgattttgctggaaaaaatatgttgaattggtgggaacattgactgaaactatagaagctatcaatgtgtttctcttgccctcgctaaatgtacacatgtgggctgtagaagatgttttaaaatccttagctatgaaaaaatgttttatttttggaaggacattattgaatgcttattataagcctatatttgttttttttttccattattagat

SEQ ID NO: 14381 - DNA, 749 bp, Aquilegia coerulea
  Intron number 2 from transcript AcoGoldSmith_v1.003240m (l ocus AcoGoldSmith_v1.003240m.g) derived from phytozome v7. 0 (chr-ID scaffold_20; pos 3366111 to 3366859 reverse stra nd)
tgttggagtcaactctacccatcacctccctcttggttagtcccacagctgttaactcgtgctttgtcatgtattggtgtctatttttactgtatagtgtatatttcatcgagtttaatttccgacctacatgcatatattttgtgtatgaaaataaagtgtaaaacttttagacaatactaaataacaaatctagaacaagcaaagagaaaaatatgagctgtattataatgcctatatgatgtaagaatcttgtgttaagacttaagagttgagacagtggaagtaacacacagaatttacaagtgttaagtcaaagagatcaaagtttacctgtacgcctgtaactgtaaaagttcacccagttcatggcttaggatctaggcttacccccagcacatgggtgtgtaagtctgtaactgtaaagttgtatggaacattggaacacaagccatgtataactaactatgcgtctttttcatttgtcattaaatgtgttatgcttgctgtgtatatattttaccctgtgtaatgttacaatgttctctcaattgattgtttcatttgtttctgtagctcaatttattactgaatagttcagttgttactttttcccatttggaatattctacttaattgaaagttatgtcaactctattagacgagtacgtgtgattaatctacctttttatcatttgaaagtttcaattcccacctgattaagtatttttggtttcaggatcccaaag

SEQ ID NO: 14382 - DNA, 794 bp, Aquilegia coerulea
  Intron number 3 from transcript AcoGoldSmith_v1.010935m (l ocus AcoGoldSmith_v1.010935m.g) derived from phytozome v7. 0 (chr-ID scaffold_14; pos 1715605 to 1716398 reverse stra nd)
atacagaagaagctcaagcctatcaagaagtgagtttcattactgtctttttagtttttcactttatgtatgatatactttggatttgctcatttcaaggattcttttgcgagtatagtgtctatgacaagttaagtaacaggaaacaagaaacaaacaggaaatggaacgagaatcagaaaatataatctatcaactcctagtctagtacataaaatcccaagaaaatgtgaacatcttgaaagagattgcctacaaatgctacgtaactcattatttttcccaattggagccaaaagaaggacggcagtccaagaatgggttgtataattttagtcgttgtggacagcagtgactacacagaatttaaagcaatagataggtaccggggtctacagggtgatgcttaggagttctgtttataatctctagttgcaatgaatccctctgtgtgaatcaggatcgtgtctccattttttagtttctattggttgattagcttcacaaaatcatcattttagtaacccttttccattatattttatcaatctaattaggttgtaggtcattatcttctcacaaataacagaacgttgatgagttatttgtcatgcacttctgtctttatttcctatttaagatataataatattatcttatgctgtatttatactaagcaattgatcgaatgactagtacgtaaagataaatttttattccatgatcctgattctaatggttcaataaatctgaatctgaacctaagattttatcatgtttggtttaggaaatta

SEQ ID NO: 14383 - DNA, 1210 bp, Aquilegia coerulea
  Intron number 3 from transcript AcoGoldSmith_v1.003436m (l ocus AcoGoldSmith_v1.003425m.g) derived from phytozome v7. 0 (chr-ID scaffold_5; pos 554431 to 555640 reverse strand)
ttttttctcagtttactttagttatagctactcaggtacgcagtgattttatttgtttaaagagaaacaatttgctttatatgttaaataatggagaatacaaatgaatactacttaattgagttaattcgtataagtagatttgtgttacccgtaaagaaaaaatattttgttagccaagttgcattctgctctgtattctaggacaagcagccttcaattatgtcttgtgtttcctatgtgctccatgctagtaattttcaagcaaaaagatgattcatctttcgcaaatgtaaacacataatcatcagctataatccttgaactagaattcaggttcagtgaaataaatttcttattagtgtcaaaagggaatcgaaattactcatggtccaccctattccaccattagcaagacacatatagaaggacgttaaagatccttctatttctttcttccacaatggcccaaataataacttgtctgttgcataagccactttgctttttcaatacttctccaatgcctccataaggtaattaggtagctcccaaggcttattaaaggactctaagagatctttcacacgcatgatgacactgggcacactaacaagcaatccacacagtctcaatacttttgcattgtaggcaaatatttggcaagtccatccctctcttgatcaagctattaatagttttaattatttccaagtttttcatccaaaaaaaaaaaaacactatccaaatccttttaaatggaaaattggtaatgaactcaatggaacaaaacacattttcaagtatgtgaaccatgcgaacaaattattaaagactacatctacttcttcttagaaatgaattgttcattgggatgaattctgcttgccttgtaagaatattcaacatatcatggataatataaaatattgcatttgaaaacattatccatgatatgttgaataatctcagtttatgagacatgggctgcatcctgcatatagaaaagtaaaccattaatctctatatagattgctttcttaaagtcgaattgcctttttgttgtgtgcctgtatcttaggagctcaggatctccgtaaacttgattgtatagctgtattttttattttatttttggttattattataacgggattattatgttgcaatatcagctggtggaagcatctgtggtgaagctggataaaat

SEQ ID NO: 14384 - DNA, 2539 bp, Aquilegia coerulea
  Intron number 4 from transcript AcoGoldSmith_v1.002636m (l ocus AcoGoldSmith_v1.002636m.g) derived from phytozome v7. 0 (chr-ID scaffold_17; pos 3905907 to 3908445)
gaccaccaggcactcaagaaagagctgtaagtttttcataatcacatgaacttctttttgtagcttgtttgacacttgatcataatgattctttattatttctcgcgatactatatggattcaattgctttacatctttcattacttcacatttcacttgtctttctggattattcatgccaaaattttgtggtcaattgtaatatcagaattccagatcaagggcattctgcttctcttatagatatttatgcattattgatgccaaaaataaaatgatcaagtatcatcacctattcaccttattcaatcaagtaaacaagtatttgaagaacagcaataatgtgttaattttattaaaaataggaaagaaaaatttcacattcaatagaccaattttacaaccatctgaaactcaaaaatgacagcaaggtttggaacatctgtttcccactactttgaattatagtcattattaggcgatatgatggttgttggcatcagtgcatcactttgtcaattggctaactaagatgtgacaggtgctcatgtaactgaaacacaaactgtgaagtatatggtcttgtcaaaggtgacaccaatcaatattcaaggctggttacgctgcttcatttggtcagtgctctcctgacagaggcttgaaattttggcctttaaatatattaccggatggttaccaaaggcctccttgtacctatatgttggcttatttggatgcaaagcagcactttacttttggagggaaggaggcttgcgtttaggttatcatattgaggatgaaagtggggctcaacattgggatatcaattatatgggttgtaggtctgaggtttattaagtagagggattatcagattatgtatgtgttagtagactcgttgtcaatttttacttgttttgacttttttgtttggaatttttttcattgattattctttgtaaatgaagtttcatatgcgatttattttattagtagcatgttaaaaacatcaaacaagctttcccttagcacttcaaactcttaattaaagatcctaaaagaacctttattgtagtaaaaggaacaaccatacgaacaaaatgtagaaaatttagtttgtagaaaggatttaacttttggtacatttatatccattcaagtatcgtcattcgtaacagatatacaaaagaaaaggataagaagaagaaaaaaagtcataattcaatcaacccctccagcaaacatgtcaaatttttgtaatttgtataaaagtctaacatgtgtcctcagtaagattcttttatggagatagactgaccacttcatttgttgccaatgtaaagagcttgttattaataagattttttcgtaacccttacttataatattgcaaagtcaatggttacaaaaatttacgacatatctgttctttgcatacgctgataatagatgatcaaaatgtattacatatttcaaagtcatacatcaaatggattaatatgtatcgaaattccgtaataatatattacatagcatacaaccagtaattcactcaacaaagaatggtttggtcaactctcactcactctgataaaataataatgcagtggtgtagtagtcgataatagggcatggaatgaaaaataggaaaaaaaagcattatgcatagcgggaagagattgtgaacgtatgatgttgaaagactttatttatgatttttttatcaaaaataaataaattttcattaatcaattagtttaaatggcttaggtcacagtacaaggcaaataataacaaaagttccagatgatattatgattctcctccaaaaggcttttacaataatgtctctaaacctacaagctgagtgagctcattccttccaaagagactttacttcacacataatatgattaatagaagtgatctgtctgcactgattctttgctttccttctttccaagtggcctaacacacaacatgaggtatcatcttcagaaatatctagccaaattcttcacatttggtgtagagagaattgttttggtcttcattatttttgcattgaaacttaaaaggctaatgtttttatccaaaacttggataaaataggttcaggagagaaaaaagtgcttctagaaatttactgttgtaaactttcagatgacacccctggtcatagttttgaggacagtatatgaaaggtatctggagcagatagtgcgtgagacttgcgtggatttgtggtggagccgtcgagggataaatgttaagagggacctagtatgtccttaattttcttttgcattacgtgtgctagaggcacttggacatgtgtcagagacctaccaatataaatagagcttggtttccatctgtaagtttggcagttatgggtaccgccagacacacactaaaaacagtcaagtattttctgttagttctttgatgtggccgtgctttgttataagtgcattttgatctcatattttcctgttggatactaattgtaatttgcttcttgttcaccaaaaggta

SEQ ID NO: 14385 - DNA, 2521 bp, Aquilegia coerulea
  Intron number 6 from transcript AcoGoldSmith_v1.003114m (l ocus AcoGoldSmith_v1.003114m.g) derived from phytozome v7. 0 (chr-ID scaffold_60; pos 792263 to 794783)
ttcctgaattggtattgttggtcatcatttcacaggtgaggtttaacttttctccttgttgatttctagttttaacctgaatttgtgatgttcctggcctttaaacgtaattagtgttatgtggattttttctattggtaagggtaattccattgtgactttaaaagagaagaccagtagttattctgcaaagtaaaatttggactttaagagagaaaaatttgttaatttgaaaaacatggcattgttgcactaaatgaatgatcaacaatcagtttcagactttcagtgtacgacaattggtacttacaagtaggggtggcaatcgggtcgggttttaacgggttgctgtgttttttccctaaacccgaacccgacctgttaacctgtttagttttttttcttaaacccgaacctgatccgctaattaaataggtcgggttcgggttgacctgttgaaacccgcttcagatttattaattatttttttctatcgccactgttatttataattgatatttaatataaattaatcaacttaatttcatcaaaaattaaaactattagtaaaagacaaaattcaaaaaaaaaaatcttgaaaaacaagggcacaatgaaacaaacaattaccataaagagcatagagatgaaaaacattaacattaaatccaattataaacatgatcaaaacatcaacctgagttctaaaaataaaaaaacactaatctggttttaattgattaattaaaacatcatgttccttaaacccaaaacaaatcaattgaaaaacaagaaaaatatttacacaatctctaacttcgatatagaaaaaataagaaccaccagcgaacaagtttttattaatcaattcattagtactatatgggtgtgtttgtttaaaatgctgaatgctggatactgaatgttggatgcttaatgctggatacttaatgctggatgctgaacactgaatgctggaaaagttgtttggttatcatttttaagaagttctgtttttgctttgtttgtttatgcacaagtgtgattttgaccatgttaccctattattggaaaagtattttgacaatacacagtaccttatcacataacccaaaaacctaaagttgatttgcactctggttgcgcaagttgaccattcagtgttgtgcttcggatgagaatgtttcacccttagccaaaatatttgtgtaactacactatattgttacgtcgtacaaacagaaaaatgttctaacaacaaaactatacacgccaatttttcttctaaaacatgatatttaaaaaataaatcttaaccttttaaacggctcgtctaaaaattctaaattttggatatggtacaacagaaatcgtcatgaacatatggaaaatatttcaaagtgaacagacaaaggaaagatcccttactaagcaaacgaatctgactgtaatttttcttctaaaacatgacaatcacaaaaaaatctgtgactttcaaacgactcgtttaaaaattccaaattttggatatgatacaatagaaatcgtcaggaacatatagtaaaacttttaaagtgatcagacaaaagaaagtccccttattaagcaaacgaatctgactgtaacgtaatttttcttgtaaaacataacaactacaaaaaaatctgtaactttcaaaccgatcgtctaaaaattctaaattttagatatgatataacagaaatcttcaggaacttatggtaagaatttcaaagtgatcagacaaaggaaaggccattaactaagccaatgaatctgactgtgatattacttaatggttatggatgataaaaacaatttttataagtgtagaattgtctaaataatacaacaagcattaagaagttaaattaagcgtgagattttcgctgggccaaaatcgctgaaatattccaattagttcttaatgcttgttctaaacaaacaacttaaaaaacacttatttctgaattttaacctggtccaccacttaagaagcacttaatgcttaatgcttaatgaaacaaacactacctatatttctccgtagttaaagaagaagaaagaaaacgattcttgagaagagatgaaaaagagaggtgatttcaaaaactggaaataaaaaatattaattttaaacgggtttcgggttgacccgacctgttagtgatcaaacccgaacctgatctgtttataaacgggtctaacaggttcgggtcaaaatgacccgaaaacctgataagactaaacccaaacctgtttatctcgggtcgagttcgtgtcgggttaacgggttgcgggtcattttgccacccctacttacaagttactcatccaactctgtttctaaaattagatataaattgtacactattgttaagctggattattatgtctatcattctttcgtaggactcacactgattcatgctattttgttcatttattcactacagtgcttaataacttctgatcttcaatgtttttacagtatatacctcgc

SEQ ID NO: 14386 - DNA, 488 bp, Aquilegia coerulea
  Intron number 10 from transcript AcoGoldSmith_v1.003324m ( locus AcoGoldSmith_v1.003324m.g) derived from phytozome v7 .0 (chr-ID scaffold_3; pos 8998326 to 8998813)
aaagttagttcctcctacattttgactatgtaatcaaggcactacaagtctacatcttctttgaattcctatatgaatatggccataaaagcagataaataatgatcagttggtcttagattagattgattgttgatagaaatcaagcattcccaatggtagtttttaaatcacttttagaaaactttttagtgataaactcttgccaacggtggttttaacacacttttcatagtgagttacttttaagaggtcggcaaatttgccaaactattggcaactctagaactacaaatcacttttaacattagcacctctaagacccttttaccattaggaatgcttttatcttgtagcaactaagcaggtgcttaaacattaacacactctacacagttttcattgagaagaatgatatcaaataaaaatatgatagtttcttctcagtattcaatcaaatgtaatgccaggattcggagcacctcaca

SEQ ID NO: 14387 - DNA, 795 bp, Aquilegia coerulea
  Intron number 1 from transcript AcoGoldSmith_v1.001865m (l ocus AcoGoldSmith_v1.001865m.g) derived from phytozome v7. 0 (chr-ID scaffold_122; pos 96283 to 97077)
tttggtattcttgttggatcaaattctatcttgaagtaagttcattttttctacatttagtgtttttgttagttttgttttaatgttgtgaattagcttaattaaatttcaactgtttttcatgatatgatggttttaatgaagtttacaaattagggtttttgaggggagtgattataatttaagattgattattgtaatgcagaatgtagatcaggcaagcaagatcataggtgtacacttgaattattgtgaattttgatgaatttagtctgatgattgttctaaatgtttggaagtttatctatttttttttagttatagatttgaaagtttatctaattaatgagttattgatggtaggtgaaagtgtgaagtggaatttattgttctgttacatttttaagataagatctgcatataaggagaaatgtgagtgtgttagatagtgaactgatggtaaagttgacaacgatttgatggtaaggtgagtttgacatggaagtgatgagtgacctgttaagttccagtatacaaatgtagactctaacatttagcgaatgagtgacttaagaatcaactgttcatgtcgtgtaatgcattttcttgagtcatttcatttcccgtagtagttcatctgttccagggaaattaagtggtggcagaaaggatgagaaagtcacctgtatatactcgaaagttcttttaatatacagtttggtttctgattcttagtaatttagtgtttgtcattgtgatggaattctaatattttttgtattgcttttctcagta

SEQ ID NO: 14388 - DNA, 4321 bp, Aquilegia coerulea
  Intron number 4 from transcript AcoGoldSmith_v1.009716m (l ocus AcoGoldSmith_v1.009716m.g) derived from phytozome v7. 0 (chr-ID scaffold_11; pos 5855709 to 5860029 reverse stra nd)
tcaaatgtacgtatctgatcatctccttcatatgttaaattttatttctgaattctttaatgttgatttgtttaacgagaaggggttaaggagactaaaactgtatgcttgtaatgaataatgaaaaggtgtcagtgcattagatgatacatattttgaaggaaaagaccaaaggttaggagagggtttactgcgcaatccaaggtttctgtaacaagggttaagtttgtggcacctttgatgtcatgggaagataatttgtatattgcaaacttcatgggcagactccacttctgctccaaaatattgagtagaaatcaaagccctgaatttcttataagttaattgttcttatatgaaggataaaaatctaaaatgatatggccgatttgcctctgagtattgcagtatcatttaccataaaagatagcagttacgacttacgacaagtcgacaactgtttcatgcatctatactttaaaccaaactgcatcttgtatccaacataatcaaggaaacttcaactaatacgatctcaagtatttaggaggtccattagaaaacaaaccacttgcagggtagaccttgttctacccttttttattacttgatgatggctgacagtcaataaccctctcaatttcaattcttggaattcacatctttatatggcttttttgtaagtttcaaagcatttgtatgtccgttattttggttgtagaatttgatgtgaacagtcaaaagtggtgtgcatgtctattttttgtctgctgtgttctgctcaatttatgtcttgtaatatgttcactagatttttgaatttgaattgctagtatggtattttatcaactgccagatgagttgtgcatccaattgttttcctcttagtcaggaacagaacatgtcatgtcatatcatatcataacattttttagaaagagatgcatattctcctcgtttcaagtgtaagccaacttttgagttctgattgccacattatatacgtgatgatgtttgttgcttaacatttaatttaagattatgaatgttatttacgtagaattgttgatttggtgatcattggtcatcagagattcggagggtttcgagaagtgctaatctttgaataatataatatagaaattaataggctcaagtatgtatcattgccatttgtttatgatttcgggtggagttatagtctgttgtgtattggctcgcaatgcgcaggataatagcttatattaagtaaggtctataggatcataccttatgtttgtttctagaaacaatgtaggtaggaattttgctcccatgtgtacttggtattctaattggtaattggtattgttattcaattagaatccttgtatggattaggaactcttgggtattatatatactcaactagttggctattgtaaagggctggtaagaagaagagagagtgaaccaaaggtgaaagcattactagatagggagagacaaatttatgagggttttcataatagggtttctcaggttctagtgtgtgagagaaaaagagacaaggaattatagatttgtaattaggttgtttcttttctctgattaataaaatcttcttgacggttgccgggtggagtaggcgggtttgccgaaccacgttagtattggtgttattgtgtttttcgattactttctctgttatttgctattatctagattatcggtattacaaccaatcattgggttaaagcttccgttgcacaacaagtggtatcagtagcaaggttttaggttgtagggattttcgagatggcgcaaagagtttcaaattcaggtttgaagtttgatgtagagaagttcgatggaaagatgaattttggtttgtgtaaagtacaagtccaagatctcttggtacaatttgggctacacaaaacattaaaaggaaaaccggcggatatgtcagatgatgattgggaagaatttgatttgaaggctactaatgcgattcgattgtgtttaacgaaggaggtcttgtcaaacgttctcgcagaaagttcttcggtaaaactttggttaaagcttgaaagtttgtatatgactaagtcgttatcaaatcgattgtaccgcaagcagcaactttacaggttgaggatggcagaaggtacaggtattaatgaacatctcagtgtcttcaatagcatgctttctgaattggttcatgttggagtgaagttagaggatgaagataaaacacatctacttctgaactccatgccccaatcctatgagcatattatcaccacgttgctctatggaaaggaaactctggaattggatgaggttgtcagtgctcttttatcttatggaatcagaaataaaggcagagataatgaatctcatggtgagggtttggtgattaatgggggatcacggaaaggatttaacaagagtaacaaggctcacatagaatgttggaagtgcggaaaaacaaggcactttaaacgggattgtgaggaaaaaggtggagcggtttcgccaaatagctctaggtcaggaaaaggcaagcatattgctaattctggcggacaggctaatcaagtggagtttgatgatgaattactcttagtgactactcaagaagaaaatttacatcaggaatgggtacttgatagcggtgccacaaaacatgtttgttcacataggtcatggttcgacaagtatgaaagatgtgagggtggctggatgtcgatgtgtgatggctccaagaagtcgataatgggagtcagtaatatttacatcaagatgtatgacaggaggatacatactcttgaaggtgttcgacatgtgccgagtttgcaaagagaactaatttttctattcaagttagattcgttgggttacaagttcactggcaaaggtggagttgtagaggtttgcagagattccaatgtgatcatgaaaggagtcgcgagtagtagtggcttgtatatactattgggtcaaacaatagtaagatctagagttagtcctaaggcaggcaaggtgatgtttaaatcacagggttctgttatgaacaaggtggctacagaaggaaggaactcaagaaagggaaagatggtcagcaagtggattcctgtggggaagtttgaggatatctcaaacttgtcggccaatcataattgattgggcacccaaaagggtggaggcggcaacatggatcaagaaggtttcatgggtgcgggtggagtcaataataatcaagttcattggctcgccaaggtggagattgttgtgtattggctcgcaatgcgcaggataatagcttatattaagtaaggtctataggatcataccttatgtttgtttctagaaacaatgtaggtaggaattttactcccatgtgtacttggtattctaattggtaattggtattgttattcaattagaatccttgtatggattaggaactcttgggtattatatatactcacctagttggctattgtaaaggggtggtaagaagaagagagagtgaaccaaaggtgaaagcattactagatagagagagacaaatttatgagggttttcataatagggtttctcaggttctagtgtgtgagagaaaaagagacaaggaattatagatttgtaattaggttgtttcttttctctgattaataaaatcttcttgacggttgccgggtggagtaggcgggtttgccgaaccacgttaatattggtgttattgtgtgattgtgtttttcgattactttctctgttatttgctattatctagatcatctgtattacaaccaatccttgggttaaagcttccgttgcacaacaatagtcacttccttctgcagtaaattgcttctgttagcaaaggtgtagggcaatgaatttagaagccttcttggcatagatcaatattaaacccagatggagggaagtgcaccttgaggtagaacaagtggagtacctccggattcagggacattctcttaggccccttccagtttcccgcctttaatgtgatatactatataggcacaatatcttacagcagaaatctaaaatttactaggctactgtgctccaataattaaagtgtacaatgcaaatcttatgtgcgataaaaacatgttagcatatttttgctgcttactgggagatgtttaattgtttgatattggtgaaccaaagattgctattgtgatattttccctcgctagttctatctgtagatcctgttttagtaggactgtttttgcgacttatatgtgttctgtatgctggctgttacagactcctcttgactcgtcctcagtgg

SEQ ID NO: 14389 - DNA, 2015 bp, Aquilegia coerulea
  Intron number 12 from transcript AcoGoldSmith_v1.000189m ( locus AcoGoldSmith_v1.000189m.g) derived from phytozome v7 .0 (chr-ID scaffold_3; pos 7659482 to 7661496)
agctactctggctggtttgcggtaagaaatcgttcctagcagtgttagtgttacttaaactttcagcgtcagtgcaacgcgggaatttttgttctggacttaatggaatatgtgctagtatatttgcataatgtaaagtaaccttaaaaaacagtgaagtaaccaaagaagattacaataaaaaacatgaactattaaactggatgtattgtcaatattgtcacctaggaagcaccgacactcctcctaggctggagtgtcagtgtcggacatgtctgggacatggcaaaatcagtgtcctattattttaatatatatttttatttctgaacacggacacttctggacacctttggacacctctgggacacacataagggtgtttttgtcgatttatataaaaaataaaatagaaaatttcaaggaggtgaaagtaatactaacaactttataacgcatacaaatatttattatctaatactcattacctactttgtttcttactctctttctctctcaattttgtgaaagaaaaaaggttttggtcgcaaaggaaatgaaaattttgatcttgggtgagaaaaacttacccaaatcttatcttcttttagatcttaaatggagaagtgaagagaaacaacaacttgaagtagaatgagagtttcacgtagagaagcatgaaacaacaacttgaagtagggagaaaatcttatcttcttttagatctctacctccacattctttgcgaccaaaaccctttttctttcacaaaattgagagagagagaagcgaactatgtaaatgtgatgtaggacatcctacctacaccaattggtttcctatttgggttaatgtttatttagaagtcattataagtttaggatttctattttagagtctagaagttctagaatagttggtttactattaagttgatattagtaatacaattcaaagtaggatttgtattttgatttatttgtttaggaagtcctagtctatataaagagtcatgctttgtagaacaattattcaaccaattcaattattcaatcaatacaattacgatttgtctctacaatttagttttctttagttttatattagttcttccttgtttcaaggcaaacctccccttgggttattcaaggtttgatttttaatcgcttccgctacgtcaaaatgggtattagataatagatatttgtatgtgttataaaattgttagtattactttcacctccttgaaattttatattattattatgatctattttttttatgaaaatcaacaaaaacacccagaggtgtccggaagtatctttggcgtgtccgaaataaaaaaaaaattaaaataattggacattgattttgccgtgtccgtgtcccagacgtgtccgacaccgacactccagcctaggaatagtgtcggtgcttcctagctttctacactctgttcacattttacactcttatgtcaatatcggatttgtttagaaggaacattatcaatccggatgtggaggtttgaaaaagattagttatgacttataacaacatccccaattttttttttaatccaaaacatgaagaatctctagatacctagtcattgaactgttctcttcagatttatgtaggaagaaattttgagaatcatttgcattttgtatggatacctattttaaatttttaggttggtcatatgtagctatacaattttcctggaagctatgaaataaatatttccattctttgcatattttgaatcataaagccacacaactcacaactttgctttttcctatatatgtgtgttttatgaaaggacgtcttactttaaacagtttttttcttgtacctttgtaatcttgttaagcaatagcctgcgtcatacaaactggataatttgattttctgcattccttttcttttttcaagtttaaaatgcaatagtatgtcactgttgcttgcttgtagactttcagcggaattgttccaggattgctacgtag

SEQ ID NO: 14390 - DNA, 2068 bp, Aquilegia coerulea
  Intron number 1 from transcript AcoGoldSmith_v1.008368m (l ocus AcoGoldSmith_v1.008368m.g) derived from phytozome v7. 0 (chr-ID scaffold_47; pos 1955022 to 1957089)
tgcttctttttatctctctcccctaaaaccacaaggtaactacagtttcattcaagtttgtttatttatttgttgtaaatttttaattctcagttggggtttttttcattttaaaagttcaattttttggtatttttttttctacttatttgattgcatttagcaatatagaagtgggcatctatactaatcttgacaaggttggttggttggttgtgtcgccaaattcccaatcaacaaacttgtttgtattcatcaatcttcaccatgacctgagtaagacaacatgaactagggtatttaagagaaagcttcaagttctggtgttctttatactgagctactataactgaggtggtcagagtgggaagtggttgtctttttgtaagtttgtagaagtagaaccaaccaacaaagcgactgaaccccacttctgagcattcaattttttttttttatatttcattattttgagacaaagtaaatggttgtatgcagttttcatcactttgttatgtttagaatttagagttaggtttccttccatgcttgacattgctatttggactgagtttttgaaatccagttttgaacatattcaatgctacacttactcatattaaaagtttttctaaaaatgaaaggaaaagggagtaaggaccttgtgatgtgaattttgaatagagaatcataattctaaggttaattgcttttactggtttcgatttacactggttaaattagatcatgcaatgctagaagtgattactttatgcgaaacttcacttatttacatacttgtttcttctgtatatccaaatgcaacattatttgaccttgttaatgctttgattcttaatatatctaccttgtgggaatgtttttgagcattttgcgagagcttaaaccttgcagagttgcaacatctgaatatcttggagactgggacacataggaatgtttttggggagtgtactaatcattgccagcgtttttttgttttatgaaatctgtttgtatcacttaatagaaagtggttctgttatattgtatgacttttaatgaacaacttctttaacttcgactcttatgatattacttgaacatctcctatcctatttcaatatcttttaattttatcaatgtttcctagcagtgaaatgagattttgtgtctaaaacaacggaaaacaggttacaggttgctgaattagatttaacaagttaccagttgctgaaattagaattaacaggttacccggttgcaggttgattggttttagcatgtctgaccccgacctgttttttttttattgatcgataaaagatgttttatttattgatgaaaagcaatacaaagaataaccttttctctctccccgtcccattacattacagatgccaatcccaagatatagttttcaacacctctcatccaatgccttgtacagtatgcttccactgaaagatgagatcctgaaacctatactctcggttcaactgacttcctaatgtccagttccatagataggcatgacccttacattcgacttctccaccagtgtaattttctccttttcgaatcttccatacactccatccaacgtacggtactaggtaggtcaggatcaggtcgaacagtttaaaaacaggacaggtttgggtttgaatattctaaaacaccaaattggcttttagggttgatgagtagtttttttatatttttgattctggttatatttcaaaggggaaggtttatatagggataaagtttttttgggttatctgtattgttagtagtttcttatgtgttcatccaaactggaatccagtggcattattgtctttaagacaattttctttattagtttaaaattatttaagcaattgataatgctgtattgccatttatgaaaagttttgtttcaaaatgtcaactttatggtttattggttgcaagtgtcgttagcacttagcacacatttttctacttttaactggttggggatcttaatcaccagaattttttcttttttagctattcattttcttatgtttcttattcacag

SEQ ID NO: 14391 - DNA, 969 bp, Aquilegia coerulea
  Intron number 11 from transcript AcoGoldSmith_v1.006087m ( locus AcoGoldSmith_v1.006087m.g) derived from phytozome v7 .0 (chr-ID scaffold_14; pos 659377 to 660345 reverse stran d)
ggtaggaaaatttcaagaagccgtagcccaagaaggtaagatgtaatacaataatttattcttgttttattgttatagtttaaaataaatggaataccgatctgaaccattacttcttcttttttttctaagctacgatcaatatagaaaagttaaatgaaaacaattatgaatataattacttcaatatgaagtcaatgttatacttgtttagtttttgggtttctttcttgtactaaacaacatagctctaaaacgttggtctaatttttatatgtagttattaaccttgcctttgttttagagttttaattcacctataatgatatcttcatgtaattaaacattttcttagcctacatacttgtaatgataatgtgatagacatggtcagtcaaaaatcagaaaaatacaagtcatgaagtgttgggggcccttgcacgccatatcaagagcatgtttgtctgcctctttaccaacatatctttctagccaagccatgcgcacatattgcgtcaatatttagccatataactcgttcgaatccgccttgtaccttgcataggttttttttgctatactatatgcaatagattcgataaaagtttccctaatattggtgtcattagtaaaatgatgatattacttaaccaaattgatcatatacctgtgaatcaatacttccattgagagaaggtaaatatgtcagttttgatatatacagaatacaatgtagataatagagcagcaagagaaaatatattgcaactggaggaaaggtttgccttacatgcccatctagttacgagtagtacttgcaatacatggagtctcttcccgaagatactaaccctgtatttgccttggcaaactctgccgtttcaattctcgtactttgtacctttttatgatattttaagttgattctgtgtagggctgcaagaggaagaagcagtagttacagcggca

SEQ ID NO: 14392 - DNA, 937 bp, Aquilegia coerulea
  Intron number 9 from transcript AcoGoldSmith_v1.005828m (l ocus AcoGoldSmith_v1.005828m.g) derived from phytozome v7. 0 (chr-ID scaffold_69; pos 889706 to 890642 reverse strand )
acaacatccctcaccgagcttttgataatttccaggtatgccaactttcttaatatatgaacaatgttgctttttggtgtaaatatctcagctgggtcttttacaaattgggatgtggcttaccatggcataaggttcagtacaactgtttataacagtgtgtaggcaagcattttacccagtcacccatgtgtttgttcataattcaccttagctaactggaaatttaaggaagtcaataataccatttgtatgcttgaagatgagctagttctaatgttctatattcaacacatggatccatggttgtcttggccctcgctttccaaaataatattagagctatcatttgtgagcatatgtatttagtagtggtttcgacaatatgacgatgaatacatatatgcatgacttgacctttattccccatctcagaaaccctaaccaatttgactattatgagatgcgagccacagccctgtagtctaattctaaagtagatcaagcttaacttttcatttcatagaatttcaattaaccagcctaccatctgtatgtgggataacctgtgtaggactacaatttgagtaggaatttgctaatgtacaatcttacattcatgtactactgaacttacccatggatgtttcggttgttattaataaaacgtttttatttaatattcttattgatttgcaaaatttttgaatttttgaattaggtctttatattacccctttttctgtaaagtgttcaacataacaacatgaccacaactccacaaggcatcagcctacatacacgagactactcagtacatcctggttctgataaaagtaaatgtcatcaccgtttctagtataacaatatttccagattcagtatatatatctaaggtacaacaatgactgtgcagtttgtcaacttcacaaagatc

SEQ ID NO: 14393 - DNA, 1433 bp, Aquilegia coerulea
  Intron number 2 from transcript AcoGoldSmith_v1.006974m (l ocus AcoGoldSmith_v1.006974m.g) derived from phytozome v7. 0 (chr-ID scaffold_7; pos 2229678 to 2231110 reverse stran d)
gcacgtttatttgctcatcaggtacgacggtgagttttagtattattattagtaacattgtcttcgtacttccatagtatgtatgccaaaattagtgtatgctctactgtaagttagttgtcaaataaaaatcccaagggtcaattgtgatttaccaaaattgtttttggctctactgtaacttagttgtcaaatactcaaatcgaatgccaagggaccaaatgtccaaatgtgaatactatattacaaatttgttcttactattaaaattatcctccagaaaaacttttttcagtcaattatagcctttcaagtttcaagaaaatagtttctcctgcagaatttcccatcatatcggatgcattaccgtgtttgtgattgatgggaaagttgcaaatcctgctgcaataaaacaacttgaaaatatgattttctgaaaggttaaattcctagctagcaaaactcccttaattatgatttgatatttgagtgggagaagactataaaagatgtgggctaacaaactttaatttatgagtttgtttcgtacttctcttcaagtgtgtggctctaacagttgtgaaaggaatgagaggaaaaattggtggtacaaacttgataaaacaggtagggccaatcagaaagtcagtcctgtgaattagcagtatatatctaaggaccattatggatcacgaactgacagccacaattacacctaggccatggcatttatcatatttcatagataaattaatgaccaaatgcttactcggcagcacattatttgacttttgggaagtgtttattttccaacattatctaccaagacgttgcttcaccatgtgatgatctctcttctttatacacatctcaatttatggtatttggcattgtatattgcttgattgctaattggtttagacttcattcctgggcacagattttagtactgagaattagaaaaattgtacagaatagtttctatttgaagtttgtcccccaccttccgtaaaaaaagtgaattcaattcaaacttctacaatcttagatgaggtttgattctctatgttggaatgtaagagttcatgtgtaaatggttagtttctagtaactcaaccaactttctcaaggcataattgtatgtgcatcattgctggttcagcattcagtgacttaaaacctataaatttgatgcatctcagattggggattgtagctcagcagcttcttagtgtattctctgaatgtaatggaatgtatatgaacatgacgaaggcgagcactgctgtgtgtgtgtgtgtgtgtgcgtgtgtcagtgtgtgtggatttcatacatcatggaacaagtgtctctgaaaatgtgcatttttatgtttgtgggtgttttaccaatttgttgtttgcattgcaggatatccttgatttagcaagat

SEQ ID NO: 14394 - DNA, 927 bp, Aquilegia coerulea
  Intron number 7 from transcript AcoGoldSmith_v1.003740m (l ocus AcoGoldSmith_v1.003740m.g) derived from phytozome v7. 0 (chr-ID scaffold_16; pos 4667182 to 4668108 reverse stra nd)
ggtatgtatctccttgaattcttttatattgaattggttgattgaggaaattagttttttttgtttgggttaaggtttctctgaccatcaccttgactggcataacataaacaattacattgacagagtgaaccatttactactgtttcacactttttgagctttctaccacttcatcttggtgaagaagtatattgttcatctacaaaaagttagcaaatcaagtttgagtttagaattatatgtagtcacctgtcattctggttgctaaatacctactttggagttttgtagaagggtttgattctatgtttttattattgcattactaattatgtcgaacaggccctggtccttaagttttttattgatatgtttagtcagtgtttagacatcagccattagtgacagaaaacccaaaagaaactaatatgcacagaaccacttcaagttgaactggttcacaggtttgaaaatatatttcattctaaagaatatgaaaaatagaaaatagcggctgagaataattaagagcccaaaccaggaaaacagcgaatggatgaaaaaacaataaataacacaaatttcatggatgaactctacacatcaatggttgtaaaaagtcatctcaataaatagaactaaaatagtataggtcatgatccccctgtccttataatagagacttacagtcccactccaaacaaacagtagattacccaccggcgtacttttttcactctgaaaatgataaaatttatggagatttatttactttattccatctcttctttgatgagaatctgagttgaagttgtcaactagctttaactgaaatgtagccatgagtctctcttctttttgtcaatgaactaaatggttgtctttattgttttgttttggttcattcatagttggactcccttg

SEQ ID NO: 14395 - DNA, 893 bp, Aquilegia coerulea
  Intron number 6 from transcript AcoGoldSmith_v1.000207m (l ocus AcoGoldSmith_v1.000207m.g) derived from phytozome v7. 0 (chr-ID scaffold_13; pos 3558522 to 3559414 reverse stra nd)
gtctacaaacactgttgtgctgcgttctataaaaggttagccttacctcaatattataagtagtaacactcttttctattattattttctgttctgtttatcaacaagtctatgcaattggtttacttctgaagaatgatgtaattcttcttgacagaactataaattcgtatctaaaaacacatgttacatgtttggtagtgtataaatctgagagaatttgcctttgcaatgctgggtattgcaccctttctgccactaaaaataaaaaactgtcgttactttaattttgctggttatgattcaagcttattctgtatgccgagatatgttacttaaatttctgtatttattttgacttttttatgataataaaaaaagctatacgtgcaacacatgaaaaccatatacatattttacatggtattagaagttaaaatcatgttttgattaatacttatttaaagtgtagtatcactccaccacgtatcaaccgtggctgacatgaaagtttggatgtagtttgtaatggtgtaaccttgcattgatgcacagaaagggctcagtgaattacaacttcccataatgttatgcctgtttattttcaatgtgaactttctaaggatatgacgtaggcagttctttcctaatgaccttggtttatgtggtatcatgtttatcaatgtgatttgtagattttgactgtgctcttgaaatttctaatcacattttactttgatgtatgtgtaatatagaaactcatgactttttggacaatggtttctgaccctccataaaacatctttaataattcaatatgaatagtgcggtgttggcaattgtggtgccttcttatcattgaagctggtgtctttataggtactccattgtat

SEQ ID NO: 14396 - DNA, 2588 bp, Aquilegia coerulea
  Intron number 3 from transcript AcoGoldSmith_v1.025889m (l ocus AcoGoldSmith_v1.025889m.g) derived from phytozome v7. 0 (chr-ID scaffold_2; pos 1188244 to 1190831 reverse stran d)
gaacaaccatctaagaccagatattaagaaggtatttcctatttcctttaactatatatatatatatatatatatatatatatatcaagggatgggcaaacagttaattgggaattgtacacacaattccagtaaaattacattgagtagtcaacaatagtcgaccctaagcatatacaatatggaatttcacgaattgagttttgagattcttagcgataccccccccccccagcccccaatgtaaaattaggacaccccctatttcaaataggttttgtgaaagctcttcagtttttattttcggccaaaatatgatgtgaactaccaaaattgccctcaaaccaggttagattgttttatggttgttttgaagtaaaataatgtagcggaagcataaaagaatcaatagattcgataaaaaactaaaagttaaactaaaattgagagatattctttttgattaattgaataataagttgattgatttcaattttcatccatggagctctttatatagataactcctttataacaagtaggaaatcaactaaaatagtaataacttatatcctgtcatatagaacactatgggtctgtttggaaacctggaattgaggctaaaattgaagatcatttttcaaaacatgcaactttgtgcatttggaaggactttattccatgaattgaaaatggaaattcttaatatcaatgaatcacaagtttcttatagggggtaaaactcttgattctaggcatgattgataatttattttgtatgtaaggaaactttaatactatcatctatattattttcctattatattacttatttaatttattttctcatttcagtctatgtatccaaacataataaaaattagcattaaaaatttcagttctctaaaatcattgttttggaattatcaactcaattccatatccccaaaaagtttccaaacagaccctataaagactttctatacctattagaactcataaaaaactcttctagacacttctaataattgcctaaacattaaggacgaaaatacatgaattaaactatattctaatactcttagaactcaaaaataccaaatagaaaactctatgacaactaaatagtttggtcaaactgagttgactcggtcaaatggagttgacacaatcaaagctagatgttctacatcataaaaccacttccacacatcaacccaaaagtggttttcacgatgatatttgatttttcgatcgacggctcaaattagatctaaagataaactaagtaatctaatcgttgttctttcgacacatggatttgaccattgaagtataccgtcttctctttttttttcttatattcatcaccattaaaggaatgaaaaacaacaattaaatctatgaatagagaacttctttagctaaataacttactcatagttgaagaatttcatcctcaccttcctcatcatttcttttgcactacaaattccaatttcatcttccatagaaaaccctagtttctctcaactcaattctcttaatttttgggtaaaatctatactactattataaacctgaataaaattcaggggtaagtcctagttaatgagaattgagctttaaaattttgtcacctaattctgactaaaatatccttttagttatggttttttggtaaatttacataataccctttaaacaatggttttattgtaatttaacatattattatttatgagctgaatttttatttatgaacaaaatgtccaataattaaaaaaataattaaataaataaaatacaacaagaataatgaagttaattaataaataattatttcatatgatttaataaattagtgtaattataatatttaataaaattaacaacttaaaactcgaatgctaatcaaacatggataaattaaaattaaccggtgtgtagcaccggctaaggcactagtgaaagtaaaatcttcaaatatatcacattattataagtttgaatctcatcttaataagatagatgtgcattgtctttctcgaatttgtattcttgtaaaatttgtacgtaacactaaactaataaccaaatgtgggctatcacagtacttttcaaaagtggatttacttcaaaaccaccatcggaaaagtctgacgtggcaagagggcattctgggtagttcatgttatttttttatcaaaaataaaaaattgggttatcttgagttttattgattgctttattgtgaatattccctagaaacaatggaaaatggtgggaatataaactttagaatttaccatcttttattagcaaatttgataggaagtttacaatttccgttcacctatatactgtaaaagtttccaccctgtcgagcataagcaattgctttagacctcttaaaattggtagaccaaaaacagtgttgccaggtctgagtatgggttgatcaaacgtccgcctatctcataatgtatgttacacatacgtcgttttcatgttgtgcatatatatagtctaacatgttttatgagttggcgattgattattttacatgcagagctgttggacagaag

SEQ ID NO: 14397 - DNA, 2168 bp, Aquilegia coerulea
  Intron number 3 from transcript AcoGoldSmith_v1.008557m (l ocus AcoGoldSmith_v1.008557m.g) derived from phytozome v7. 0 (chr-ID scaffold_18; pos 3869614 to 3871781 reverse stra nd)
acaacatagtcaggtttttgtaaaatcctgaattctgtataaatttttgttgattgattatacggcattccttatgttgttatttcctatatgacacacatcgcggatttaccaatgttgatagtttaagcattcacctacgaaactctcttttcttatcataagcattttattgttgatagtttacacttcacattgccaaatcttttttccatttgcatcccgcataatcacagctatgttgatcgtgcctttcgttgttgtcatctgaaaccaacaacttacatcagttcaatccagtctcgccctctcagatctgttaggattgattcactttccttttctttccctttagctccctttcattttctttcctcattaggcatgaaagtaattccttctgtgattcacaaacccgtggtgaatggtgatgtcaagcaaggcaacttaaattctacactggcatgcaaaccggcagtttgctacttcacatatgttctttggtccccactatttttttgttgcctttcttccttttcctagaaactgtaatgagttggtttagcacattgtttaagggtgatgttgattgagagaacaaatagaagaagcttacattcacgcaactcaaggtgggtctttttctttgaaagtttagggattaggcagacccaaacctgtattgatcaacctctctcattcaacatttcaattgtatcctccaaagtctcatccaaaagacgaacaaagaaaagattacattatctggggatacatccactttggccaaataacatgcccctctattacattctctaagaacatgtaacactgtaaatttttttgacatagccagctcagctttaatgctaagaccaaatcagcataataccagggaggttgctcgatgttgtttaggatttgcatcacattaaaagaatctgacaggctgcacattagttaatcgtaacttctgacaaccttctagcccgcctcaatgactcataattcctggtactctggtagagtactgaattttccctgttgtagctttggtaggcgactaggtgagcagcacatgcgaatggttattgtgcaccaatcttcattctttcataatcatattgcttcctcttaaagactttatccattgacattgacctttgattcagtaggtttcgtccatgtaccatggatagtctccttcaccttgtacttagctgatacaccaataattttaaggaagactctggcagaaatactgttaggaacatcattcccctttctcagcacatacttcttcattgtctttatcgatgtcgtgctaacaatctttgctggtttgatcaaggtgggattcgaagttttgaacataatacgtggtcgtgtttttaggcactggcaggcaagtaatgccttagggtccactgtgagggttgtgagtagtgtatgtgatccattctttaaaacttgaaatttctctactcttgtgtctttttatctggaatccaaaataaagaaacagacgaaacctatccttgttgggtatatagagctctgtccacatgtcacaactgaatgtccttgtcccaccaaatctgctattcgctagctcctcttcaacccttttcatttacctatttatgttgcaggaatgtttcctattatgtatatcaagtatatgtatatttatatcgaactccaaaataaaaaagatcaaggggaaaaaatgtccttaacaaaggaaaataacaacccctgacaatattaggcacaattatcacattgtttatcccagatattcctgatcatacccagttaggagagctccttttgttttgtctgtttggagatttttttactacagcctttttattacaaataattagatattatattctgtaagatgactatacttaaagggttggtggttttaatatggtatttttatgtatttatgttttcctcattgtttatcataaactattggcacttctgacttttgggtctttgaaacagttcgaataatttcgataaaaaaaagaagtttgatctgttttaccgagaaggtctacggttcgagtcatttccagaaacgttgttcgttgcttaatttctagcttgctttgaacaaattgattgataaatttttggtaataggttgcaaa

SEQ ID NO: 14398 - DNA, 1532 bp, Aquilegia coerulea
  Intron number 6 from transcript AcoGoldSmith_v1.008583m (l ocus AcoGoldSmith_v1.008583m.g) derived from phytozome v7. 0 (chr-ID scaffold_15; pos 2594381 to 2595912)
ctttgattgagtctttgttcttcccagctcttcaggtatcctcacaattggtgttttattttggcctatattcaatgccaaacacttaccaatcgtttccttagataatatagtttcttcatacttttatatatttcaaacttgttgaatttcatttttgcttgttaagtttgattctgtctacatatgattttttattttttttatttttggttggcaagtgggattgaggggacccctacccctttaaattacgtgtggaaacttatatcaacaatcagctcttgacgtgtttcgaacccacgacttcttcactttgtgcgagggatgcaaccgttaaacgatctattcaacccccaaaagccaaactatagtgtggagtatgttaataatatatactggcgaattattatgccaagaagaagaaaattgaaaggaagaaaataacaaaccaaaaagttttgctcatatatttaccaaatgaaagaaactctgctcatgtatagagaagaaccagttctggactatgaatacatatctgataccagttaaaagttaaaacaaggcttactttgtttctctatttaatgaccattacaagtactctaaagaaaagggactaggtggtattgcttgaagactcagaagacttaaaggtcttcagttaagattttcatgaaagggtaaggtaaattataggggtggctgaataatagagtaagacgtctgtggatggtgggatactaaaaaatgtgaatgggcgggataatgttgtgatttccaagctagtagcctcttggagagtttttgtttagttttcttcttttaaacatatcttaaagggcgtgggtagttttttcttaaaaaaaaaaacccaactgcatttctcgccgagatgggaagctcggtttattgttgaatcggccgatctcaactattttattggattcgataagtctcagaataaggcgtgttgtatccctcctacggtaagaatcgatttctttccaaaatctcactgaagtatcactgattaaatagcacagggcttaatagaataagaaccttttcttctatttattttaaataaggttctttggcaccttcatcttggatgtcctttttcattctgagatattttacatccaattaagatttgtaggtgaacttgattttaagacgctgtgttccaattcttgtaaacaattttcactttaatttttatttttgcttgtcaatcccttccttaaatgcgtcaattaggcattgcctgtactttaagatgcttgattttgccaataaataaggttaaggagttagtttacagataaaaacaaattgttgcgtcaatattggtgggctagtacactgggcatattaggcctctcgagatttatattttttattagaagtctttcttcatttactttattctagatctttttatttaaaatgagactgttttggctgtaacttatacgatgtttcctttttggggtttgtttgcatctctgcagggggagtcggggaaa

SEQ ID NO: 14399 - DNA, 3513 bp, Aquilegia coerulea
  Intron number 1 from transcript AcoGoldSmith_v1.002756m (l ocus AcoGoldSmith_v1.002756m.g) derived from phytozome v7. 0 (chr-ID scaffold_20; pos 23560 to 27072)
ttagtcagactgttcaatctctaccttattggctggttagttcttcttctttatcttttggcaattttttgcctacccaattgtcttattgtgattatatatatgatttttgtgaaatacccatctgttgatttgattgctaaattatatatctttttatttgagtaaaattttggatcttaatttgatttgggtttaattctacaagttgatcagattgctatgtgggttagatcatttcgtcgcatatcatatctattaaatcccatagcttttgttaataacagagatttttccgaaaaagcaacttgatttattgtattaactgaaatcactaaggaaggagttgaaaagaagctccatgtgttctagaacaaaaagtctggactgtttcgtcctggggagagaatttatcagaagttttatcattgtttttcatttaattatgtcttgttaggtataatataacagttatgttaagttctgaagaatacatgatccattaatttaggatctcttttgcatcggagtttttctaatgagatttctagttgtagttacttgctttctgtttgaatctcgggttgttcttttataatatatgcatcctgtcctactgatggtcctcaaaccaaatgattaatagtatttaatatgggatgacatgacatagcttctccattgtatgagggaatgcccacaagaggaccatgggattattgaagagaaacaccattcacagaccacaatctactttaccaaccaatcgaaattattaactttttttacagaagtcctcagaagtgtaacatttaggacaaatacatgcctttcaaaattccaacgatttgatgctcgatagtgttctgtgtttagcatgttaaaattgtatcttgtaagagcattcccaatacagggtggatttattcacctccacataggggccacgtatgcgccactaggataaatccaccttgctgacttaaagtgaaactctacaaggtggagagttcccaagggaaggtggactctttgagatagaaagtggatttctaaacaaattcttttgaaaaaaaaaatagagacggcatgtgacatgccttctgagagtccaaaatttttaaaatacctttgaaaacttaaaaaaatacagacgacatgtgacatgccgtccgtttcttttccacaaggtggattctcccaccttgcaatccacctgtgggttcccacttctcaaaatccaccttcccttgggacagtatttttaagaaaaaggtggatttatccaccacacctcccaaatgcagggtggatttatcaaccttcacgtaggccccacatatgtgccattaggataaatccaccttgttgactcaaactctacaagttggagagttcccaagggaaggtggactctttgagatagaaagtggatttctaaacaaattcggacggcatgtgacatgccgtcccatattttttgccaaaaaaataggtagagtcatgtgacatgccatccgagagtccaaaagttttaaaacacctctaaaaacctaaaacaaatagtctgtttctttcccacaaggtggattctcccaccttgaaatccacttgtgggctcccacttctcaaaatccaccttcccttgggacaatattttcaagaaaaaggtggatttatccaccccacctcccaaatgcaccttgcattgggaatgtgttgaaagtaagggtattataggctttaggtgtgtagtttagtcccacatagattagatataaagtctatgtggtttttctctctctatatatagagagagttagtttctttgtaagtttaaacctaatcaatatcaatataattcatcttttgtatttctagttggtatcaaagccagattttttctgcttccgttgtgtgtttccctgatactgttcaccggagtactgttcaccggaatcactgttcatcgatatttttttttttttggtttgtttgtaaggttcaagtttgctgttttttttattgttggtgcaccactcttgtccaacccctttccagggttttgtctgcgttgtagcgcggcttgttcaaccctttctagggccttgtatgcgttgctgccgtagtgcgccgcacttgtccagccctttctagggccttgaatgtgttgttgatatcatgcgccgttcttgccagccttctcaagggcctcttctgcgccgccatccgtctacagttttattgtttcaatccagccctttcaacggctttattactccaaaatcagtcttctctcgtcttggagtacctcatatttattggtttttgaagttatatcagatgctttgtggaaagcaaaaccctagccaccgaaacgaacatgaccctagcaatcaccaccacaacctccgacacatttcttggctgagcagctggtaatccctgctcctttattgtctctgcagcttaacatccctgcagacggttcttctcgcagatggtcatccctgctcctttattgtctctgcagctggacatccctgcagacgattcttctcgcagctggtcatccctgccattgaacatcttttctagtgtcgttcacaagatattttatgggggatgtgagagaactttttttttgtttttcaagctgaaattcagagtctgaatgttcagcttgagggggtgtaacacccatgcgttggtgttagtcccacattgccaaggaagtggttgtattggtagtatatagagcttatccatactctaactaatgtcaaggccttttggggtaaaccacatgggtgggccctgatccaaaaccctctactgctggatatccgcagtgactaaagggagacaatattggcattagcgagcggtatggtgctcgacacaccgggatgagcgaggacgaaatcctggggcgttacagggggagtgttggaagtaagggtattataggctttaggtgtgtagtttatatctaatctatgtgagactaaactacacacctaaagcttataatacccttacttccaacagaatgctctaagggtaacatcttgaaccctgagaccctgatgttgtttttgtccgtatgtgtggttttgtccactgttcttttctcgggccgtcctttatttggtttttcattaggtaacttgattaattactaatatggttggctataatgcatttacagagtaaaagaccgttgttttcaatcgttagaaaattaatatttgcaagaattaaggtcttctaaggtaatagggggttccagaaattcaatttcagtggacagcttgtaacatctatagagctttccatttgcccatgacttgttcaagcgggtcagacctgtaacacaaggacacccttccctttcatgtcttggtcccttaccatattctgtgtcactggtacttttatttgggatgtttgatggccttgtagtattttgttaactttaatgcactgtaattgtgtttatgcttggcagtt

SEQ ID NO: 14400 - DNA, 2805 bp, Aquilegia coerulea
  Intron number 1 from transcript AcoGoldSmith_v1.009439m (l ocus AcoGoldSmith_v1.009439m.g) derived from phytozome v7. 0 (chr-ID scaffold_37; pos 366716 to 369520 reverse strand )
ttgagaaccttgaagatcagcttgagttttttcatgtaagtttctagggtttctctacttttcaataaatttgattgtttgaaattattgaacagcagcttcagaacaaaatttgtagttaatcttgctattaggttgattttataacatattagttgttattcatgaatgttaacttttcctcaatttctaacaaattgggtctaaacattaatgttttattactgagaaaccaaatagggcaaaaggcaagagaaagcttcattaatcatatttatacatgtttaggactattttattttctatttagtttttgtttgtaatgttaggtggttatgcctttctagaaggtgttaactagcagtgaaatgtgtttctaagatgcatttgattgggagttgtactccattactgtggactttgtgactttcaactttagctgtcttggtgtatactcacactgtagtgcatacattagaaaaaaaaaaaaaaaaaaattcttctttggttatatagcagagtagcaaataaagttttcgaggattcgtcagacttctccacggtgtatcttcatggtcattggttaaattcttgtgatcaaactcttactgacagtaatgcttatcgtagtcgttgctcccaatctatatggaattgagggggaagacaatagcagccacaaaaatccaacttgtaggtttgcaaataaaatgatcaatcatatataagttatctaagctgagttggattgtaagccatgcatcagatcttgacatatgcgtcatgtatttttatgctttgtattcatttcattaataggaagccctaaatggttcttgtacatgacgatattaaatatagattactaaggttcaaaggattttatagtttggtgaatcaatccctcttgtatgtattttgtagtttaatttaacctagcttacttaatcctgctcatacatgcttctgctatgctccgataaatccatgcatgtaccagcttaggttaagcacctgcttattgccagtagactggcattagcatatttttcctcagttgagggactctctgcccctcgcttttgacaaagttatcagtggtgtttgctgtaggtttataaaccaaataagccatggttggtaatgttctttagttgtttactatggcttaaaaacccagaaaaccaaaaacaattagctacaaaatcaagctagttcaatcattcagttaattcaatttaacctataccttagatgaatttccaaaataaagagttttgttgtaccaatttgagacagtaaattctatattgtttttacggtcgagaatatccgtaacgtgttaattcatttataaatatcctttaacgtgtaaattcatttttacctataacttaggcgaatttcccgatatatcagtcaattctcagttgcatttccaatctttttaggaaatcttatctttgtccccattctcaatcatttataagtacccgttagtagttacaaacttgacactaaatcaggttgtatatgttaatttgcgctaggttttcatttacactctttgggttgtgttttctcagtaaagcacgtgatgaccatatcttccagttgtacctagacatactatagtacgaaataaactctaatgctttgtgttttagcattttcttttgttagtcaatccaacaatattcaagtaatatagaaatgaaccataaagtgccatgagtattgcctataagcatgatagttaagagactgtaaaatctttatggttatttttctcgatcaaatttagtttttgtattagtgttgctgaaagattgaaactggttatatgcttcgtttgggtatatgagttatttgggtagttttttcggtctttttctaggtaaagttgtcagtgatcagtatttactgcctgtatcatttatggggactggaaatccatcatgttaatcttaaaactaagatatgttagacttaacatcagcaagaacttgtgctgtcacatgttgtattgatgttttaaaagtattatttagttaatacttaattcctcctttttgatatagcatccttttctttgaagaaacctcaaggctaggttttgagttatactgtgttagggaacgaaatcttgtcgagtaaggaagaaagaatgtcgtgagatgtgtttattcagtggaattcaatcaagttatgtagaagaatgtgtgggttgatggagtatttgtagtgtcttcctatgatgtgaattgtaagttaatttctacttgattttatcatgtggaataccgaatgcatggtataatattaagtaagtgggtagttatttctgttttactatgttcaaccttccttgcatttcaatatgaactacgatggtttgttttgtaaattgttgtcaacaaaatgcttttatgttaaatctaatattttggaaattgtgtggcgttatcagtgttctttcatttgtttattcagctctttcttttccttatttctgatgactctcgactcagatgtttgttatacatgttttgagtgaactagtatattcactggtgattgtttgaaacattgcaatcatttcaggtttcagtgttccattatattgcactttttttcattgttataacttataacgagttcacgaaatagctttagaattttatcatattgttatcttttctgcagtaagatgcttagcattctcttctagtggtattgatccaatcttaaatttatgtaccatttatctacagactgtacaattgcaacagcgggctgaaagag

SEQ ID NO: 14401 - DNA, 4457 bp, Aquilegia coerulea
  Intron number 1 from transcript AcoGoldSmith_v1.018987m (l ocus AcoGoldSmith_v1.018987m.g) derived from phytozome v7. 0 (chr-ID scaffold_38; pos 1492031 to 1496487)
gcaaaattcttgaggcccaggttagggatttaatccactttttattaaccaatgaatgacttttattttaccacatttgatatatatatatgtagccttgatttgttattctgtgaaagatctggagagcatattcctggttgttttgttattgagactgtttaatgtgttcgtgcatttttatttttaaaagatgctacactgttattgtttgtgcattagttttgcgtgccttaggtagtgagttttgtatatgttgccctccaatttgagactagtcagggttgtgtctgagttgttttgatagactagatggtaacttagttcattatgtttgagactagtcagggttgtgccttaaactgtcttaatgtttgtatcgacatgttaatacagaccatttccacctttagattgtcaagtagaaattatgctgataagacagcctccgtcctgactctagatttaatcaaaatgaaactctgcaacttcatttggactaaaattagtactacttgaggtatattgcgagaaattggaaatggatttcattttttagacctgctggattaattgaaacttttgtttgttatttcaatgtcccacataatatttctttttcatcccaaaaaagacaagattggatgctatatgaacttgaagtgttttaagttttaactaaaaaatatatcacactgcaatatttattcaaataagagctaattctttgagtcttaaatggtccagaacacacattgaatagagagtatacatgcgaaatcaggatggttacagaaaacatcagttcttttgtttctcatgctttccccttaggattagtaaggtgggaattattgttttttctggtcttgaacatggggacattagtgaaatgagtaattcatatctgtattaatgtatttcttgatagaagatgtacgaaaatattgtctctcctcatacattgtatatgtataagaatatcattattgtttgatctgcctcttgaaagaatgtgccaaaaaagactttagtgcattcataccttacttgacatgagcaccaacaaatattggaaacagaaggctaggtgttttttctatttgttgaaaggaattttgccatacaccttgttaacgaaaattttactaatatgccacattgttaaaaggaattttgctgcacacctcaatctacatctgtacttggctggtgatctagtttgttttaagtttggttctttatttgttgtcatttacttttcttcttctttttctattgtattaatgttgctttctgtattttgttttcttgctcaaatggtggtttggaatactttagttgggtctgtgggagatatgtggtctgtttgttgctttgagttgccgaagttaaaaatgtttgtgttattagattctcctcagatctatgctccttgatcaaatcgagttgcaagaatgtgaatcagaaagatgatacttagatgtgctcagtgttgggttcacaggatgcagctggagaggactgcctgtcagttgacatgtatagatttgatgagtttgctgtttgtagttcctgaattttcatttgtttgattagattctggtcagatctatccttcttgagatcatgaattgaaattgtcgagttgtcgagatgtccacatcagaaagatgatacttagatgtgcttatggttgcgctcacaggaagcagctgggaaggactgcttatcagatgacatgtatacagtttttcagtggtagcagttacagatgtatattttagtgtttggcatagttggcagtaccgcagtggtttcagaaaagcactagtggatgttgtttgacacagtaggactattgcatagggttggatttgatgtagttagaatttataagttataacggtaagccaaatggcaaaagaaactgcatggtgaagtaagagaatttaattctgtgacttgaggagattttgttatataggagaagagaataaattagtcattagcatatcactcaagttcgtgtttacactgtacacggccttatgaagcatgctaaagatagttgcttcatatgtttcctgtggaatgtttgtatttcagctgctagtgttagatgcagcaggaagcttgatatgtggagagcttaaagtttcacctgagcagaatagtattgagagatgtcgttgctgcttgagatcatcgtctattgctcgaatgacacatacgttttctctctaaggatctcttcccaaagtgtcactcttagtaggaataccttcttttgactgaattgtctggatatagaagcgttgacctgttaatttatttttgcagaagtgtctgtttgctccaacacccaatgattcagtcgaacactcagatacgtagtccataaggtgcaaatatctccagatggttcttttgtcttcttgtggatggcactaagcttgtttttgaggttttgtagtatttttgacctataactttgcgggtacttggtattgctgatgttcctttcatttagaatattatacagagtagccatgtcccttttctttgcttctctttggggatgttgtggtctttgttggttgtccagaagcttggaattatcacctcagccaaggtttgttttggttcccattgaattatcaccttcagtgaaatgatcaggcctacttttgatccagcgaccaggttgtttaagaaattctcactgaagaagcatattgtggctgaacatttgttgggtttataggagcaaagatgtattggaaccttcagtgaaaggcagggagtttgcagcatagccttattctcatggcattttcatactgaaaaatcactaagaaagggatcattggtgctggaaagcctcttattagcatctgatagtccataacaagcttgttgagataaccttttctcacaagcttggatagaatcagctagagctaattttttcatttggaccgtcttaaagagtttgaaccatatggtagtttgcatgagaagcgcatggacgtatctccgtactccatcatgtgtagcgggaatggagacacagctaaccactggtttgtagattgcttcattgttagacaatgtggatcagttcctgcgcccattgggagctgttgcaccctgacatataaagagcagcacaagtgaagagttggctggaggcatgggtgcatgagtagcgcatacatatctccgtactccatcaagtttagttgggaagaagtcacactaaccactggttcttacgttgctgcattgttagagaattgttggatcagttcttgcacccattgggagccgttgcacataagataaaaagagcagcatcagtgaagttggctggagtcatggttgcatgaaaagcacatggacatatttctgtttgcaatcatgtgtagtgtggaaaaactgaaaaagacaccgctaaccattgcttcttacgttgctgcattgtcagagaattgtgggatcagttcctgcacccattgagagctgttgcacctggcataaagagagcagcatcactgaagaattggctggggcgtggccaggagcagtatcgaacaaataattggagattggccctatgcaagatgttaggcagtatgaaaagtacagtgttcttatgccaggcacaaagatgctttgagaatgtttgttttgaagcaaaaggtctacttatgatactgagatgtgaatgcagaggtgagatgaaggcttcttactctgaactgtttccatatggaacatgcttgtaagggtactgtagcgtagttacttcccttctgatttcttaactactaggtcgttttaacaggtgagcttctctctcacctttatttgattccctatccttcttttattgttttttttattcaagaatcataaaaaataaaaggtgttggttcactctaactctgctgagtacggtttttattgttgaatgctaagggacagcatgctgtatacttttggtaataatattcttattgttttgcttgtatacaagtttaatttctactttgttacattgatactcacacttcattccacgatgatagatggtcattggatcctgggtactggatcttctaagttatccaccttaatgtcccacgtattgatggttgagatctgtaggcaaacagataaatatttgagggaacagttgaatgctaggggagattcatgacgtgtttattatatgaccattgttgctcacttgtatccctatcacagtgtctttgattttatattttgtgtttcgaaatgagtcgtattatttgcaaaattaacataatagaacatcattgggaccactctgaagtccgtacttatatgctgttcattgtattgaacttttttttttttatcatttatggtgcatgcgatctatttcgtaatttcttgttcgattgtagatc

SEQ ID NO: 14402 - DNA, 3497 bp, Aquilegia coerulea
  Intron number 5 from transcript AcoGoldSmith_v1.025814m (l ocus AcoGoldSmith_v1.025814m.g) derived from phytozome v7. 0 (chr-ID scaffold_3; pos 249729 to 253225 reverse strand)
gagagaaagccaaggagtatatactcagttgtcaggtctgtctactattttatcactttaaaaaaactttttctgttaccaattatataacaaagttaacgaatctgaggattatttccatagaagatcttcctatactacttcatagagcttaaactattgtgcatctaaagctaaggagttactgtaattcttgtttagcaagattaggttcgtttataattgttttcattttatcactagtttttgttgtaaccttgtttatgccatcaaattattctgaagctaatgtcatttccaagctgcaaactaagtcatagattgataggattttgataaagtcctagaataacaacacaactattatattttgttatcaggatctgcaacaataacacaacatagaatttaaaattttaatgtcaacaaaacaaacaagatcatgcttaggtagatgagtaaatcatttcttgtctttgaatgaagtgaagggaaggtgctaacaaacctcatggaacctatgatcatcctcaccatcattgttgtcatcacagtttcagacgcactatctcatgttgtgacctcgtttgccctctcatattattcaaaataagtgacatttcatgacataatatatgatctaagctccaaaagtttgacatacgatacacaatgtctttctaaggtgatgtgtgctacttagctaatcaattttttgcttatctcgaggttaacaaataacaattttagtcggtaagcgtggcatataccgcaagtaattccatttgctaaatagatcccatattttgttgatgatcgttcaccaaatagttataggtgcttccgcttcacaatctttcgaaataattaaacaaagagaacgaatgatatcactgtgtgatccaaccacaccgaagaacaaatgctatgtccatgagtcgtctgtagctacacatttaaaattacttttggtacttctgtttgcactccatgtgtgaactaacgcaaccaacgagatgattcccccatgtctaatgcaagcaatcaaggctccctccacattttggccacccatatttgttaattcatgttcaatacttctaatatcaattttatttggtgatcatagaaactcatcaatcgtagttgtctggaaacgttcgaaacattcatatacagtctgctaccaagtttcttcaagaaagttacttgagcacctatattaagtaaactgcatggagctgtgacattaaattttggataggttttagtttattaatggtggctacaactatataaaatatgtttctgcgtatctgactcaggtaggacacaatcttttcaaatctggagtactcattccacagatcaatagacattttcttttcataaaaaaaaaagatgaaggataagtagatgtttggccaaaatatatattagccgttgttgatgattggtgtgaatctgacctaagttaaataatatgttgagtttttatgagtggttggaagttgtcgccatttgtagtagttgggatgtatagtttagatttgaggattgtaataaggtagttgggatgaattgttgaggtttgtggattgatattatcctatcaactccccaattcttttataatgccacaaaatctcatccaaccatcctaactaccttgcaacaatctctaaatctcaaccatatgttccaactacttcaaataactactctgataaaaaacccaaaatctcagctacttcattaaaccaaaagtccacacattaacttaggtcacattcacaccactctgatgttgaagataaaatagttgctgcacagtcagctatgtataccaatttacaacacaactaccaaaaagtatagtagagattttctggaagtgcaaccattcggttgttatgcaacagttatagcataaatattttcatgaaaacactatttttgaagacacaacttttggccaggttaatttatgagcaagtggttgtttatatccatctttaaaacctttttacactacagatttgtgacaatctgatactttcaatagaccacgacgctatcctaaagtcaagaagatgtttgttatgcaattcttgcatagagttgctgagctaattttttcacgaaaacgtatgtgttggggagcagatagtacaggagtgctccaaccttttgtatatatgtaattcacaactttgaagatgagtttctatgatcagccaaaaatgctattgtacttagtttacatgaatcagttcaatatgggtgactagtatatttaaagaggcttgattgcatgcattggatgtggaagaataatcctgtagggctgcttcacacaccggtcataaaagggtacctactgtaattttagtagttgtagttaataatgactcgtggatatgacatttgtttcatagttttggatcacactatgatgttaatgtgttggattattctcctctgttcgatgatttcaaaattcgtgaagcaatctccttttaactttgaggtgaaagttttcaatacagtatgagatattattggttgatggaatttatccttggtctgtcacattggcccacttgtataacagtttttgagccttgagatgagaaataaattggtattgctaaaaagcaagagttcattcagaaggacatttagtgggtatgtaggatatattaaatgcttgttttttccattgtttatgattctcaggatttggagcccaacatgaatgtaacaatgttatgattattttgattaaggaccatgaaatggattataaaatcaaagaatattccagactgtttttgttttaaaactttcaatgagaaggaggattggcaggacacctaccagtttattgacaatagaaaacgagaaacttttaaaggcttgtttttctattgcatatcatctttcacaattttggaactaaatgaccataaatgatgtgaaatgttgtattatattgagtggtatgatttttgacaatgagtcagtatccaatattacattcttggctgtgatggtaacaacagtggtgaatataattttgattcttgagttccatagaggtttgttgataagtcgttcattttagcctatcttaagtgaagacatgatcccttaaccgcaatctctttgattttgggggttgaaaggttattcacacgcttgttactgttttttattacaaggttcaactttatcttatgtgttgtttttgttggaattgcaatgaattgaatacaatgtttttctgctgttgttatttgtactatgtaattccattcaatgagtaagtagttggcaaattggaaatgacattcgcatgacaagattatgaatacataaaagattctacatttgcttgtacaagagtacatcaaatcaaaaactccattagagatgccgcataatttaacataatggtgtatattttaacgatttaataatttgcatacagtcat

SEQ ID NO: 14403 - DNA, 1411 bp, Aquilegia coerulea
  Intron number 1 from transcript AcoGoldSmith_v1.002142m (l ocus AcoGoldSmith_v1.002142m.g) derived from phytozome v7. 0 (chr-ID scaffold_26; pos 284408 to 285818)
cttcatcagatcctaaagttctcgaacaaggtaaagtttttttttttttttattaatctttaatgcttgatcagttaaaaagtttttatttttatttttgcatttgatgttttcgatgaaaatttgattgcttttcacaattatttttcttaattaagtaattaacaacaataaagtttccgcatcaaatagttttttttttattttttattttttattttgtaattttaatatctgggaatctggtatttgttgatattgaaatgatcggaagaatctccgattctttaggattaggaattatttagtaatttttatttttatttaaaaaaaaaaatggaataaaataatataaaaagctgaaaattttatctacagggaaaaggttttactgaagtgggtattgtttgagtggttcaagaactcaaaaaggtttagttgttgttctggttgttgttacagttaactttgggaatagcaaattccaaatttccaatcacattaactttctagagatgtgtgtgatcatttaatttgttagacacttttgaatcagaaccgttgatagtacacttttcactttgctacctttaactacttgtctgagcattctgggtatcttttgctgttgttagttattcatatagatgtgtgggctgttgctatcactttctatagtgataggtttctgcctctggttacctaggttcagagttcagaccatttgatggtcggtggagttctttgtgtttatgtgtgccccgatatactgatatgcttccagccttccacactgaagtttactggcaaatataatgacatttactcaacttcctctagaagaaaatggatttgcgataaaagaaacttgtatccgtagcttctgttttgcttttttttttttatatacatgattgtcttatttgttatcgcagctaagtactcaactaaacataactagaaatttgcctgtattaataactgcatataatgttataaatgtatttgctatatatgctcaccataatccgatgcgagtcatctgttcattttataataattctagtgttttaatcgtagacacatgtaaaccataatggtctactatggtaagttatataggataatatactccaaatactttcgaatctcttaaaatgttgaaagagtgaagtcaaattagcaattcattatgaggtgctaaccaatcaaatggcgtagaacagctaatgcctcgattaatcaaataaatgcggtaccatgtatttttaagaaaatggatggatctttaccataatcccatgtgttgatgatatttcctttctaagttttctaattaatttcctaccaaacctcctttctctgctttctgacaggactgcaagagggacaactctgtttacaaattaat

SEQ ID NO: 14404 - DNA, 933 bp, Aquilegia coerulea
  Intron number 8 from transcript AcoGoldSmith_v1.013841m (l ocus AcoGoldSmith_v1.013841m.g) derived from phytozome v7. 0 (chr-ID scaffold_1; pos 2476039 to 2476971)
agtgccttgatcgtgtctgctgcaaaacctgtcaggtactgtgaccataataacacacgacattaactaattccatctgaaacacatgaagggtcagttttgaggctagtgctctgttttggctaattaatgtatttggaatattttttgtctagtcacaaagtatgagcataaactgacttcatgaacactattatcacaaaaaaatgacgaattagatttctccagagactgcaaatgtctgtctttactttgaagattagtacaataatgcgaagagctaggtttttctaatgcccaaacagtcaaacacacatacttagaaagatctgattacttgaggggttgggtgttcaattttcatgtaagttccgtgttcccatatgtggatgaggttttgttattccattcaatgggatactaaattttagttttgttgcatgtgtttgtgctgtgtttaacatttcttatggtgaccaaacttcttatgttgctgacaagtgataagtgataacctcttccctatcgcacttaggaatgaacagtagccctggcttctcattagatcctcttagtagctcagttttttttttaattcttactgcgtcctcatgctaacaatggtactctaatagtctaataccttagtatttaatgtgttctctcagtgttaagctaggattagctttatgagctattatagttggccgtctgtgcatacctttatcaagtaaaggaaggtgtggtaaagtagaaaataaacaataataaaaaccacaagaaaacaatggaatgagtaagaaagaggatcctttgcataattctgtatgtttaattctcttgattttctatgtagctctattttgtgctcaaatcttactttatggtaacatatttttcattgtttagtctgtaattgcaaaacggagtgag

SEQ ID NO: 14405 - DNA, 949 bp, Aquilegia coerulea
  Intron number 11 from transcript AcoGoldSmith_v1.000689m ( locus AcoGoldSmith_v1.000689m.g) derived from phytozome v7 .0 (chr-ID scaffold_15; pos 2698586 to 2699534 reverse str and)
gaaattttgaagttggagttcgtatccacatacagtacttgctgtcttatctatgttaaacatctaatttttgtagcaaacataattgtttatgcacgtcatatttgaagttgtgtatcgctatcaagtcaataaggtagtagactttccgtcccaaagagatactcagaacataaaagaaaagtatagtgagagagggcatctttagttattcttaataggaacgtttttgggcacattcttcttgattaaaactttggagatttaagtaaaatattccagttggagtattggtaaaactaaattagttaccaatcctagctttgtaatgacaataaatatagttcactaattgttaaacgtttaattactcgaatgtatcaacaaaagtatttgattattttggctaatgattctaatcaaaataaatttgttgggcataggaaatatttgcattctcaaatgatatctgaggggtttgcagtcattgtggacattccattcccactgcgattagtatcttctctagaaagtaaagaaatagccaaatccatttatctacaatcaattcattccatattctttttgcaattataaaagttctataaacatcttataagggattgcttttcattgttattggcattggtagttgtagtatgaatgtctattattcagttaaatgctattatgtatgggaggggaatagattgctgggaagttttgtgatgtttatgtttatcctctcttcccttcagcataaggcttttctgaccaaagacatagactaatagtaaattagtaagtcgcttatataattataagaataaatcttccaaaagagatggatttaattcgatacttggaagctgcattctcatttttgtgttcagtccttaataatatgtggtaagatattgctgacgtgaccaacttcgttcattctggc

SEQ ID NO: 14406 - DNA, 1247 bp, Aquilegia coerulea
  Intron number 3 from transcript AcoGoldSmith_v1.001823m (l ocus AcoGoldSmith_v1.001823m.g) derived from phytozome v7. 0 (chr-ID scaffold_43; pos 25777 to 27023 reverse strand)
gagccctacattaatcaggtttgtttggatgcaacttggttaatttttggtgttagttttgaatgcatatcatcattgaggtcattgtttttgtcgccgtcattgtcatcatcatcaccaccaccatcatgaatttcactatttggtggtgggtggaagaatgttagtctagttcctggaggtgggtggaaccatggaagtttagttcctggaggtggtttcaacactgttgttggttaaaaaaaaaaaaggataccaagttttctgtcgtagggacattttgcatttttctgattgtgttcccacttgaggtgacggtcctacttaacatactggaagcttgaaaagtttagaattccatcttaaagaccaagaacaagatgaatacacactgaaaatgaaagaataaactagtttttactgataatgataatgattctgattaaaagcgatcctctcaattttataaagctaacaagacttaggactcatgtattactaattaaagtccactcttacctcataaccaaaaaggaccataggtgaaataattgcaaaaaaccgcgaatattctacgaatatattggtttttctagaaattggatatcagaattttcctgaatatttgatgatttgtgacatatggtttgtttctagtctcgaaatttcggatatatccgttttttttggaaatcggatatccgcatcaaatcgatattttcaactatgaaaggactagactaaatagtaatgcaaatataggaagtacaacaccacaacacaaaatatgggttttcctgatttaatttctcactagataataattttaaatttttaaaagtcaaaccaaagttacttctatagaggaaaaacattatttgtataataattgttttcgtacatgatgacacacccttgcacacaaacattactgtatgtatgcacacacttatacacctatatatgcttgcgaatagtttgtgcgctcaacatcaagcatgcaatatagttaagaatacgaatatgatacaaattttcttgtttggaagggggtaatctgttttatacatctacatgagaaattgcagtttatatttgtttttgtttgctctttattgttggtaggtggtaacataaagctcgtatttaagcatttaggttatatatcttaaaagctaaaagcttttcatggcagtgatttgttcttagctttgattttgtttttcatcttctgaaggtattgactt

SEQ ID NO: 14407 - DNA, 2090 bp, Aquilegia coerulea
  Intron number 9 from transcript AcoGoldSmith_v1.007114m (l ocus AcoGoldSmith_v1.007113m.g) derived from phytozome v7. 0 (chr-ID scaffold_15; pos 3546427 to 3548516 reverse stra nd)
actaccttaataatttctgtgacggaacaaaacaggttggcactatcactattattgtcattctatttgtgtctggaagactggtagaatttttggaaatgtttacatgtttcatcatttctttagcttagactctgttctctttgagaaaaggtattgtttttttttttttttgccaatgtccaaagcatgctatgatgctagtgttgagcatttactcttgaaaattgaaaggagctatctttcacatgtcctatgacacagatatttcatagggatgcatatattttgacagcagttgcacatgagcctgtggctcagcggttgcatccctctcacaaagtggagagattgcgggttcgaaacacatcagcagctgattgtttgataaattttttttcctcacgtaatataaaggggtaggggtcccctcaacctcgctggccaataataataaaataaaaaggtttgacagcagttgattggattgttgattttctactcctttccttggatgtttgtttctttgacaagtaaagtagcattgcataaataataagggcacgttatttttaaattcaaatatgtcaagttaagctattactttggatactctgatgattggatgcaaatttaatgagaagagtggcatgcgattagtgagtcaatttcaagagaatgcatactccttcaatgaaataaccgtggtttatccacattggaaattcattttattacattcgtttttagtctgtttcagacaaattctttgaattttaatatatttttatgtttacctaatgttttggactccaattcatgtttgtttggttttgttaagattcgtaatttctcatgattgggtgaagtactgaagttacaacatttaaaacacggagttgactagttgagagacaaatttaagtctcaatgaattgcccaagctgtgagtggcggcgtagctggaaggaggaggtgaggggacagcttcagttctaaggcatggactcgccacaagagtatctatgtctaagatcaaacaagtttcagctacaaacactaagggcgttccaaaatctagccatcatgccggagtagctggaaggagaagtggaatagacaaattcagctctgagtcatggggctccatagtggacatacgtctagctgagaacaaatttcagttacaacctgtaagggctatgtaacattgacacatcactgccccatgctagagaaaccaatttcagaaaataaccctatgtaaacagagagcgacaatagataaggtatgactaaggagtgaaaaaagtgcaaggatatgactatccaactacccagaatcatagccaaagagaacagaatagatgattgttttctttcacatgctaagttgtgttaattgtcaggatcttattttgagtggcaaaccttgtgaagaacctagatggaagctacacgccaacaatctttccatgggcaggttgggtgaggtagactaggttggaaaaaaccatagggtttccctgagcatgttggagatcttataacttggcctatggttagggtctcctttgcaggttaaaaggaggtcttgaagaagaattgtttttaccatcatgtgggttatttcatggccagatgaaaacttttttatcgtgaatcagggaaagactaattcatgaaacattggtagattagaaattttacgccatccacaagatgataccttcacgtcctttgtcacaaaatgaaatatatcttcatcgtttggtggtgatttatttttaaacagtaaggtatttagatttcattattgtttgtacttttgtagccattttattcttcgatttagatatctattatgagagttccgtgtatgaccttagtttttttatctgtctggttgcgaagctgaagttacagtatatggtttgttggagatcttatttgatctgtttcacacaagttatttctgttgcttgaattgatggatgatatttgattgttatttattattacctattcgtgattaattcattttttgtactttttatatctctaatcctaagtgtttgaaattttgaagg

SEQ ID NO: 14408 - DNA, 924 bp, Aquilegia coerulea
  Intron number 1 from transcript AcoGoldSmith_v1.014716m (l ocus AcoGoldSmith_v1.014716m.g) derived from phytozome v7. 0 (chr-ID scaffold_1; pos 776812 to 777735 reverse strand)
aatccctttttgagtttctatctttgcgttattgggttagtagattggttactaattttattattgatttgtttatatttattatgttttagatttgaggaacttgcattttttaggtaattgttctgaaatggaagaaattgtgtttaataaacttatatgacaaaattacggggaatcgagtgaatggattcttttttggtagatatatacaaagtatacaacaatcccattggagtgactatgaaataaggaagtttaattaagaggctttggttatacacattggattttgtagaatcttctgatgtcgtaaataccaatgtaattgagtggttgactaaatttttttttttttttttcatttccaaattaggagtttgtttaaatgctgttagagacataatctaatggaaataccccaatcaagtagagcaatgggttggtgtgtatggacccttctagtagcttgtgggttcaactcccaacaacaagtatggtcgtttggctttctggtgggttgaaattgcttagagtccaaactggtaaatggcaaatgacctcttgggcaagtctggttcgctagtgtgttgtagtctggtgccagtctttgactaagcagagtgctccctacattgttaggtataatttgttcggacaacccattggagtgacaaactatatgatattatagatatcttgttttagctttggatatattgtttttttcttttgtatgtcaagtgttttttgataatctgaaacccattgatagttgaaaccttgttcattattaggcacatctaagaatcaagctagaccattgtattatgagctgtttaaatttgtgatattatgtatgtataaaggagtagaagaaaaacatacattaactgtgtatgtactttcctatgcagaactata

SEQ ID NO: 14409 - DNA, 506 bp, Aquilegia coerulea
  Intron number 27 from transcript AcoGoldSmith_v1.017844m ( locus AcoGoldSmith_v1.017844m.g) derived from phytozome v7 .0 (chr-ID scaffold_17; pos 3033544 to 3034049 reverse str and)
ttttatactccatattttcttctttacaggaagaggtaagttcttgatgccaaaacttagtccaccttattgagtaaacatgcatccccacatgctttatggaaaacaaaacgatattggccaatgaaccctttgttgagatgattcaaaatgtagagagtatgacaccaagggatgaagattttttctagttttcctagtgcatcttggttaaaatatactttctattttttattgtgttagtagtttaaaacaccgaatcctgttaattacgagaaggttgtttacattattttgcaaaactaaaaggtttggttgggggaggggggagattagataaggaggcacaatgataattgaaaataatttggaggaaaaggactaaaaacatgaataataaatatatattacttgaatattctaaggttttatacatgaaatggttaaaatctttatatttgttttgtacaggttttaggattacttgttgaagtcttaaagaaggg

SEQ ID NO: 14410 - DNA, 417 bp, Aquilegia coerulea
  Intron number 1 from transcript AcoGoldSmith_v1.004121m (l ocus AcoGoldSmith_v1.004121m.g) derived from phytozome v7. 0 (chr-ID scaffold_20; pos 3172239 to 3172655 reverse stra nd)
agtttctaatctaatcaccattcctagctgttcaagtaagaactcaatacccctttgttagttttgataattttttgacgaaaaaaccctttaatttgacgtttttattgattttattttagttatagatgttagaaattgaaatcatcttcaattatgataatttgttctttattttcttggaaaaaatgtttataattatatttagaagttgtattacttatctgaaccagcaatttatcttgtacattatgataagtagtaatttaggttgtctttttatctactaaaacctatagtagatatggaggtagaatcacacaattgtgcaaatatgtaggctttttttttttttatcaagaaaacccaaacattctattgatttatttcttttcttttgaatttatggttgatagg

SEQ ID NO: 14411 - DNA, 634 bp, Aquilegia coerulea
  Intron number 1 from transcript AcoGoldSmith_v1.004814m (l ocus AcoGoldSmith_v1.004814m.g) derived from phytozome v7. 0 (chr-ID scaffold_47; pos 65924 to 66557)
agaactctctttcaagctttcttttctcttttaaggtatgaacaatatttcttttcctcttttttcaatttgtagttagatctgtgtattcatgttcttgatttttatgaaattcaatttgttttgttttgtttggttttcttttgatttctagatctgtgtaattctatagatttggatcgtttttttttttaatcgttttagttttgcgtagttaggttcctgatgatctgatctgcatagttattttcgatcgatttgaaagtctccatatcatctgtgtaattctatagattttgatgatttgaaggtctgtattgttttgattatatgggtttaaaagcgatctacctttatgaaattgtttggtttatcgatttttttttcttcattttagatgatctgtgtaatcatttttgagttaagagttctttatgtttttgttgatgaatattttttttttttttttttaatttaatttttgttgaagctatataatttgccaaaaaatttacaagtttttgatcgaaaatgagaacctgttgaaaatatgttttgtttgattgatattttacttcttgtttggaagttattgtttcagatcactaatcttgtttaaaattctattcaacag

SEQ ID NO: 14412 - DNA, 965 bp, Aquilegia coerulea
  Intron number 12 from transcript AcoGoldSmith_v1.003400m ( locus AcoGoldSmith_v1.003400m.g) derived from phytozome v7 .0 (chr-ID scaffold_5; pos 8004746 to 8005710 reverse stra nd)
tgaagaaaaaggtgtgcaactgttttagcttttaagtatacttatttagattatttttaagctaaagtttagagaacaccatgtgcatgttaaataactagtaataatatggtagatacttccctagagccatatgaatgttcatttcggtcattgtactttacacatttttgcagtttggtcataaaagttattttctgtcagtttggtcatgaagcttacattccgttatcagttcagtcacaaaataagtcgccattaagagcaaatctgttgaccaaactgactaaactgataacgaaatgtgactttcatgaccaaactgacagaaaaaaagtgttgtgaccaaactgcaaaaacgtgcaaagtacaatgaccaaaatgaacattaatagtgcaacatcacatgtttttgtgatgttatatagcgtactctttttttttcctggataagttgcattttattaaagactaaagaattacaacaaaaaagaaaataaaagaaacggaaaaaagcaagggagccaggtaaactctatgggggtcctccacttgtctaagaaatggaggccttccaacaaaagtttccctaatatctgggcccaagttcactgcatagttagctaaaaagtctgctgaagtgttcacctccctccatgtcgatgttaccaccacatgctcaagctttgccatcagcataaggtctggtcatgccctcgtacagattctccatattcatagcatggaggtctgttcgaattgattttttgtagttatgtagtgaaacacttgacattggatttggtagtgggccacctaacaacacacaaccagagccctcaaaagacattttgaagttgtctaaaaacttgtgctatattgctttaaccaatgcatagtcttaagtgtattaaactgaattataacatactaattacttttcttatgccaggaatcaaagctat

SEQ ID NO: 14413 - DNA, 199 bp, Aquilegia coerulea
  Intron number 5 from transcript AcoGoldSmith_v1.023910m (l ocus AcoGoldSmith_v1.023910m.g) derived from phytozome v7. 0 (chr-ID scaffold_1; pos 3840494 to 3840692 reverse stran d)
acaacaaaaagatacaaaaattttctggtcatactgtgagtacatattccgttcctttccttacttctcatccctttccttttgattttttttttcgcaaattttacgtagttattctgtttttttggtgctaatcattttgccttgtttcctacaaactaattttagagttctatactgttaaacagggtgctgtccg

SEQ ID NO: 14414 - DNA, 3381 bp, Aquilegia coerulea
  Intron number 5 from transcript AcoGoldSmith_v1.005085m (l ocus AcoGoldSmith_v1.005085m.g) derived from phytozome v7. 0 (chr-ID scaffold_1; pos 6783935 to 6787315)
catagctgcacagagcccagggaaaggatcagttggtatgctttataaaccctttcatactatcgtatatatggaacgacactggtcttatcagacttttgtctctccatgtgtttcagatttcgaactgtgtatggtttagaattttcatacacctctatttttgaattatgagttacaacttgtcatctctgatcacctctttatttatatcttactattcaatcattggtcattaaagttaggctgtcaccaaggtctcatattctattgactagaagtataaaagatgaattatactagaagtagaatattagggtggaaagctatatgtctcaatgtgagacataacttgtatatataatgaaagaagtgtgttagacaagtcactactattacaataacttccaacactccccctcaagctgaacattcagactctgaatttcagcttgaaatacaaaaaaaaaaagttctctcacatcccccacaaagtatcatgagaacgacatcgggcaggatgttcaatggcagggatgaccagctgcgagaagaaccgtctgcagggttgtccagctgcagagacaataaaggagtagggattaccagctgctcaactcagaaagacaccggaggtagtggtggtgactagggtcatgttcttttcggtggctagggtttactttccacaaggatccgatataacttcaaaaatcaataaagacgaggtactccaggacgaaagaaggctgattttggagtaacaaagccgttgaaagggctgaacacggatggcagcgcagaagattcagtggtggcagtgcagaaaaagcccaagaatggcgcatgacatcaacaacgcaaacaaggccctcgaaaaggctgaacaagagcggcgcactacggcaacaacgcatacaaggccctagaaagcgctggacaagtcgcgtatgacatcaacaatgcacacaaaaccccaataaacagtgaactgtgaacagtactccggatgaacagtgattccggtgaacggtactaatgaacagtagacgtgaacagtacttgatgaacagtactcaggaaaaaaaaaacaatagcacaaggcgcagaaaaaaacccagcagaaacaaagacacaaatttgacaaaaagactttcccggagctctgtccaccggcacctgagttagtgtcgccggtggccgaaaaccatgacctcacttggctgtgataccaactagaagtataaaagatgaattatactagaagtagaatattagggtggaaagctatatgtctcaatgtgagacataacttgtatatataatgaaagaagtgtgttagacaagtcactactagtagtgtgttagacaagtcactactattacaataacttccaacatattgattgttccatttaagaagatctttgtttctatatggttggatatttgctcccgtgttttctcaagggcctcttgttgcctatccctaaacatggtcaatctatccacggaatatgcctctcttgatcctgtctcttgtcctaaatagagcgtaaagcaaatcatgaaactgtcagtccctaaaagtttctaatatacaaagtggatgccgtgtatagattttcacatataattacaaacgatattaatgaaacatacagagtatgcacttgtgttgatgcgtttggtaattacttttattattaagatgcttaaattatatgaggtggcaacaaaatagttctgctacagatacacatcataaaaagtcggctagttattagtttcagggggacaatattgttgtccaagagcaaattgtttagaggtgagagtgactaaattctagtaattttggaaaatgagaactatgacaatttattagtaatggtcgaagtcagttgagactgaggttgaatttcattagtagttggacacctcaaacatgtgccatagtaccacatgtaaataaccaggaatatcagttcagttagtgagaattttaaaagttgaaactgtgattttcactcctaaagcgtggaagcacaattataaagtgggaatgtcaacccctccacacacatttggttgcaatgcttatacccagatgctgtatacactgtaaaaaataaaacatcagtatgatctgaggatcagatttgtaggatgtttgtttgtagtttgtaccagtgtcaaagggaatgccacaattgtccattcatctgtttagtaagttgtagacgaaattgtttctctatttcgattgaaccactgagattctgagaatttcgatgtgctggctaaatttaaccaattcttaataagtactacataatctctgaataatgtaatttgtcattgtaagaactctttcgaaagcttcaagttgtttatacttggcacagatgaaaaagagatttttttatttttattttttttggcataacaagcaccctacatcctttaacacgtaacaatgccatgtagtgcagtcatgctcttttttttggccaaaaattgggattgtagatagttactgtcatctttcagcaaaatggttaagcgaccacagaaatttgttgtcttttcgtttgaactgcttaacttctttgttcaagcttagaatatgaagttctttttatctttttcataaatcgaacacgctttgcaattcagattttgtggatttctattagcttgaatatttcctgattaaattggaaacagtttttagtggacatattcatttgtgagagctatcatttcatcctccctcgctatatcttcgttatctatatgaagtatcagtaagaattatattccacctcaccaacttgctttcatctgaaactaaatctttttatgacatgtaactaactatagttgcacaatccacatccttttggttcctgtgcaccttacttgtgcgtgaccaatgaactcatccttgatgacggcgtgactcaccgtgacttgctccctgtacttaacatttttgttgttatcagtttatcacttttgtgctgtgcatcattttgatttttgcgaatgagtcttcttcatcggtcttttttcatatttcatctctggctgacctgtgtactgatgattaatactttactaccagcgtcaaatgtctcttggcttcctttccattatagtcttcatttagcacattaaaatttaccttcgggtgaagaatctgcttcgtcatggtttttgatgttcatcaatctgctccattatgtattactactcttgttgatgatttgttacttaattttacgatataaaattgctgtattatctgttatttgacacaattctgcttaattgacatcaggggcctatcttgggttaactggtaaaagaatttca

SEQ ID NO: 14415 - DNA, 2807 bp, Aquilegia coerulea
  Intron number 3 from transcript AcoGoldSmith_v1.012634m (l ocus AcoGoldSmith_v1.012634m.g) derived from phytozome v7. 0 (chr-ID scaffold_3; pos 3196483 to 3199289 reverse stran d)
gacaggtatttactacaatatgtttatttatgctttctatacattgttacatgatggatatataggtaaatattctgaagtaacatttactgaggataactcaaaatgattgacaaacacaatgagtggactctggtatgtcctggaaatactgtgagttgtttcgaattggttgaagtagttgagtaggaggatcactatgcctatagtgcatggtagattcaccaaagacgaaaaggaataagaagagtaagtcaatccaggatttatgaacctataattgagtctgatgaaactataatagaggggtgcataattacatgatgggaataagtcaagactttgaagtaatttttactggggatgaacctagaattgagattgacatacaaaatggaatggcctttgaatggtctagaagatatcgatttgtatgagcttaatattaaatatagtattagacattgcaaattatacaaactccctaagaaattgtatttgaagacaagtggaaggtcaatcaagtaaaaaaagaacttcaaagtaaacaaacaaaccagtcttaagcaatatcattcaacaagttacattatggaccacaacgatgagttctttcctccaacttctttaaaatcccaaagaaatatcagtcccgctcgaggtcattaaagtccagtataggttttgtagggacaccagctaataaaatccacacttttctttgtcaggaagctggaggttttccaaatttaggccttattcgacagattagaaaccttatcaattagagtgtccctgcattcttaaggggatgctaaatgtgtttttgattatttttcaattaaggtattaaaaaatatcatttttaaatcaatagaattgaataatactttaaacatcccgccttcttatgaacacttgctctagttaaatagtgtctgatcgaaataggtttgaatgttgagagcctataggaacgtaaagattttgtactagctggtatccctgtagaacacataatgaacctcaaatgacatggaacaggtttaacatttctgtttgatcttaaatgatgaactctacttggaggaacaattttgtgactgttatttggaatgaatgctttatataatgtttatgatcttacctgacattatctcaatcatagctagatatccagctcttgacactggtagtttttgtttttatttttgttttgttttttgaaatatttttgcttagccttcaaaagaacataattgttttaggatgtgttttacattgagattttgttggatttatgttggatcatacataaattcatatttcgcccatgcaaactgtaaaatcatatgcttcttccgattcaaaggtttttccgagttgtatgtctgttttacctccatcaaaatcttcgaaactactgtcattgatactcctctattaaaaccacctgattgtaaatgctctttggccaacatagatccatgtaattgtacaaataggagtcaagtttgtatcaactttagtattgggaaaagtgcttcaaatactcatatctcgacataatatacagtatagtgcaattattttagttgtacacttctactcagctaatgcgtcgcattaaattcttgacagagggcgtgcacaatgtgaatacagttcaagtgtgtatcaactgcagacataattatgtgaactagttaaacacttgtgaaattagttctttggagatatctaagcatcacacttgaattcttaatttggcagtaatttaagtttcaacatatgtagtgtcttgttgaatttttcaatggttaacacttaacaatagtgtaaataagttcgttaaaaaaacaggcttgccaataaaaataaataaaaacaaaataagtttgtgcttgtttcacataccaatgtaaagttgttgattgacttcattctaaaagttcaattttgtgccaatgcaagccgtcatcttcaggacaaaccttacaatttacaccccaatgtactctgagtctgcactaaaccaaacagcgcgcatccccctcccccccccccccctcctcttccctctccttttttttttctctctcccctctctcttttttcccccaaaataaaaaacctgcaaaactaggttccatgtagtagggaaagaaaggtcttgcctcttatttttcttcgaagtagcaaagaagagcaacaaattgcttggagatgtaaacgctttgatgaatggctggattccttagctcctggacagcaaaaccagattctaagcagtttagtttttgtgttgaacaactagagaggagtacaaggaaagaacataaattttttggaggaaataatttgacatgaaaagtgatgacagactcaagtagcaactactgtagtgctttgttaatgtttgattaactatgatgacctgaacttttgatgttccgttgatcctcgtaatcatgcaataatttctgcgtaattttcttcaatggtcatttgagaatggaaaaatgagattatgatctttagtagattagtagtggtttgcaatctagactcaattaagtcctcaagaacgataccatttgagatcaaaggatatttgattcacagttgcaagttaaagtggggtcttgtaataacttttgaagtatgtgtattgaaaaagacactattcactgttattttgccttgttcatgccatgctgatcaactatccagaaattatctgtaacagactgacagcaatggatagtggttgcttcattttcaggttgctgataaagttcgtcaag

SEQ ID NO: 14416 - DNA, 1168 bp, Aquilegia coerulea
  Intron number 1 from transcript AcoGoldSmith_v1.019395m (l ocus AcoGoldSmith_v1.019395m.g) derived from phytozome v7. 0 (chr-ID scaffold_5; pos 6724871 to 6726038)
tctacaaaagattgctcccagtgcttcaaaatttggtactcatttacatatgatactgaatttatgctgtaatttaattggatttatgaaggatattgactgttttgggattttaagtgtcaaattaagagaatttataaatctgtgctggtcttagtttctactttctttttggcatttttaattgtccttggaatgcttccgtttctcattttagagttcatattgtgtctatgtcccggtgctttgtattagcgtttttatagtagtttattagagggcaaatctttgacatataaaatagtctatatgtgctttcaagtgatatgcgtggagttagttatgcttatatagtagcttggtgatatgctttcatcccgttcttaatatgtgcctatcatggttcttatgtaagaggtaatttaaaatgggaagctagtcgattccttgctatgcatgttatacctgggtctgataccaggagttgatttatatatggtactgaccacaaaactttgatttggcgttttgtcagttcctgagatgtttgcatttattatgcaacggtccaagtgatctgtcaagccacatgatttcttccagtattaattagtttcctactaagtaacattggcacgtatacgaagtgtcagatacggggcatcctaaaaccagttcaacaccggacacagattgtgatttatttaaatctatcttttagagatagaggacatcatatctctttctcaccctttttttgtttatttatcttttggtaattgtaaatagagtcttacttatctctcgtcttgttctctttttttcttccctcatgtttcttcatattttcgtgttttagttcaacatttaaacccaaatcacatgcatcagtttctaagtgtgtccgatatgtgaccccacgtgtctggagcgcatgtcaagtgtccctgtatccgatgtggttttgcaaaaatatatggagtgtcgttgttatataggtttcctgattatattgggctataccttccattcttgtctgtcttgacacttcagtgttcttattccatagttggtagagaaattttcttgttattgatttttggttcgctcttatgcaatgcattgggaatcttattgacataaaatatattgctgggtatttaggtat

SEQ ID NO: 14417 - DNA, 1831 bp, Aquilegia coerulea
  Intron number 6 from transcript AcoGoldSmith_v1.003122m (l ocus AcoGoldSmith_v1.003122m.g) derived from phytozome v7. 0 (chr-ID scaffold_36; pos 47518 to 49348)
tagaggcaaggagcattatttattttctgcttcttctttccgtgaattgtttttatttaatcaaagtttgtgaaactttttgagaattgctttcctaaatttagctaaaacttagccttgctttgctttcttgtctcacacgatcaataaattttcgcatgaagccgtatatgctattataacttataagtgatttcttaaagtaggtttgagtgtgtggcattggactttctttttaactttccggtcattttatgcatccgtttctaagcacttgtcataactggtacccattctgttggtgttattttcaattatcaaagtgatttgtggaagtcaaactataattagtagaagttcaattttgttttgttttgctaagcttctctttagacaaagacattcccaagctctttagctcctctagcacagatatataaatgatgctagtcttattctgttaatggtggctagggtctgctaacttcctgactcacccattttgtcttaaaaagttttccaatgtaatttgttttgataaataaaacttttactgatgatgcaaattgcaaaaagaggttacaaaagtaggtgaagcagtattttacttaggccctaacaaagtaaaaagccaaaaagacataaccagaacagaaaaggtctagctactgaggatgtgttcctcaaaaatgtggtcctggaatctagtgccctttctctccttcaggtctgccacccagattaagggtgtccccttcacctgtaggatcagcgacctataatcatttgcactcgataaaaaaatagggatttcttgctttctatactgaccagacaattgcataaggaaggaaagaccataaggtagggccgatggaagcacggtgacttgtggccatttgttcagaactttcctcacatattttgtatcaaaatggggctgcaccagctgaattctggagaagaaaagatggtgccaaagctgtaaaatcaggggacaaagtaggaagaggtggttgatgctttttggctcaaggttgcagacaaaatagtaaaaactggaaatattacatgccacaatcaacgtgattttgtcaacaaagtgaaccacttgcaattcactctctgaatgttgttattggatgaatagtctcacaaaacttatacatgtctgggttatgaaggattaaagtgcctcgattttgtgtatacccacagcttttataaattataagcttaaaaacatgagcctttgaagaaggttcctttattttgccttttgttcttgctagtcgtggatgctgatgatttggaagttgatgactacccaagttttacctttgttcattctttagttattgaaattcattgtcatgagagtgagcactgggtataaaactatacaccttacattgatggtcaactttcccatgttattacttgctgttttaatgatatttttgtcttggaaacgtaccattgtaagactacatgaggtagtggctcattgctgctaggaagggtaaagagtttggtaaacagtacctgtagaccttgaatactataaatgtcagtccatatgcaagagtaaattcatttgtattttgtagttggtggcattgtgcagtaatctaccgtgttccttggtacctcctaaagttttatcatttggttgcttaagtatctgtttttctagtttaaagttaatatctgatgtttctattctttgcttgttgcactgttatctcaattagtttagtagtagtagttaatttggaataatgaaaatttttctttagttcttaactggcttgtgatcatatctcaggtt

SEQ ID NO: 14418 - DNA, 1835 bp, Aquilegia coerulea
  Intron number 2 from transcript AcoGoldSmith_v1.011911m (l ocus AcoGoldSmith_v1.011911m.g) derived from phytozome v7. 0 (chr-ID scaffold_5; pos 7628246 to 7630080)
ccctttaccagagccttcaatacttaatgtaagctcaaacctatattacattagaatagtatttccttgaatgtcattagttttaagttgtggcactaatttaccacaagagtattttctactgcttaagcttgatattctctgtgagaaatatgatgcttttgtgcttcttcatttgattttgtaaatgtaaatgctaagcattaatagagtatagattaggacatttaatctttttaaaccttacaaattaggagcttcaacctcaatcatgtttttgtaattcacataaactttagttgggaaaaccaaaatatgttcgtgtgatggagggtaggtaactaggtaattccacaaatatagtgacaattttttcttcctgttcgggcaatcgaattctctaagccaacagtttctgtaataattattggtctgttttccaacttatgtgacctttaatcttgtcatcaacattattcagattaccatagcttgggatataattatacaactccatctgtttcagtttcttctgcaattttttaattttcattcactttttcctcctcggcatccatctgttgctacatctattcgtccaaattttaaatttaggttgagacctatttgcatgtgtaatagttcaccttgattttttggttcctaaatgctcttcgactatttttgccaaatgttttgggtattttggatacttactacaatcaccaagcacctctttgatccaaattgaaattgtattttacccttaaaagatggcgtgatagtatcaggcatgtcattagtctttcacagtagatttttgtggtgaaacatattgcaatagttctgcataagctttgttaatatcaaattgctcagaagtttcgtccttgccttcatatttagtgtcttatacttctattgttagagttctccatgtttctattataggttgccaatttttctagggttatgtaaactttgctcaatattagaacagatagaggcctaattttgttaaagcctctttctccatctcatacaagtacatctgtttgttattattattatataagacagatagaggcctaattcttctctttctcacacacacacacagaaaaaaaaaatcatcatcttcttcttcttctagttacctgtgccgatatagttacctgtatgctgttgaaggctttctgttttgtatgtagtggaaagggagctttaattatgtagtggaaaaagaatattgttaggtgatccaagcaaacttaaattatgtggtggaatgggaaaaggggtaatatgttaatgcttagggagtaagaaagacatttcacctgtgtaagcactcagcaatgcacgatatttcttatgttaatgcttaggaatattgttaggtgattcagactacggtcgaagccaattacaaaggttcagaggaaaatgagaccctttcaaggaggtgattgaggcaatacggtaataacctttagagctacctgtccttatcaagcgtctgctcaaaaacagggtttcccttaatatatggggtgggaccaggtcggattagtagcttgagggtcgtgtgtttcgaacataaaacacttttggcattagctcggggttatccaattaaatatcaatacatttagatatagtgtgcggtttagaaaatgtggagagtctatacaaaaatttcagtatgtatacccattttgttgattctgccaaaagtccaaaacacatgcatctaacaatgatgtgtaggcacttgttttcatattctttgtcttctaatatttggtgcatggtggtattcaggacgggagaat

SEQ ID NO: 14419 - DNA, 875 bp, Aquilegia coerulea
  Intron number 1 from transcript AcoGoldSmith_v1.008584m (l ocus AcoGoldSmith_v1.008584m.g) derived from phytozome v7. 0 (chr-ID scaffold_54; pos 1452329 to 1453203)
gtcagcaaaaatataggtgtaattttcattacaaatgcttgtttcttgtttatttgatttgatttatcattagttgtgaaattgaattggttcttatgtgtttgtaactctgtttaattaacaaattgtttgaaaatttcgtgatcttataagtttgtgttgactattttctaattttgttgatttgattacttaatgaacatatactctatttgattgatttgttagaattagaacctgtacataattaaaccattttattcaaaggtttatatcataaattgcatttttttttttttttggttatgtctccaatcagcaatcctagatgttgtcaaacttaaatgaaattcaactcaaatccagaaacatcattgattctgagtaatttttaggatcgtggattagtagttgaattcatagctggaagatatgcgggtgtaatatattaggtttgaatttgtttcgcattggaagtggaagaaagcctttagaataagtaaacattaatatgaatggcacatgacactttgttaaggaaccagttgagatatcttctgatgtatttttgtttactgattggatgctcaaactacaaacttaaacacaaaatgttttcgagcgcttctttccattttaaccatgaggcaaatgtagtcctaagtgtgcactgttcatgcaatatgctttgatataaaattttggaagaataagaagaagaaagctttagggacaattttctccttgtgcactacagaatataaatataatccagatatataatggatgtaatgcgggtatctgttagggtgagtatctatgtggatgacttggctatatcatactctcttttaatttatgtaggaagctctctg

SEQ ID NO: 14420 - DNA, 2675 bp, Aquilegia coerulea; identical to SEQ ID NO: 14260
  Intron number 1 from transcript AcoGoldSmith_v1.010445m (l ocus AcoGoldSmith_v1.010445m.g) derived from phytozome v7. 0 (chr-ID scaffold_3; pos 4981989 to 4984663 reverse stran d)

SEQ ID NO: 14421 - DNA, 374 bp, Aquilegia coerulea
  Intron number 19 from transcript AcoGoldSmith_v1.002794m ( locus AcoGoldSmith_v1.002794m.g) derived from phytozome v7 .0 (chr-ID scaffold_10; pos 3024821 to 3025194 reverse str and)
ggaaggtaagttttgtttgtactttgtcagaagtgatatctatttttgtttacttattttcttctgtattataatttgcaacaattatgtatcgtggcaacgaaagttctatttatatatctttattatcgtattcctactaaacataaaatcccaagtaatttaaacttttgtagaatataataggataaactaagacaaactgacaccccatgtctccaactagttctgaaagattgcctcttagtcattgcttccaaacgcagtgttcttatgctgtaattataagataattatcggaaatccaaaacacctaacttagttatgcttttttgttagacaccggaacagctgctaagtgagaaagtgcccaa

SEQ ID NO: 14422 - DNA, 337 bp, Aquilegia coerulea
  Intron number 1 from transcript AcoGoldSmith_v1.006921m (l ocus AcoGoldSmith_v1.006921m.g) derived from phytozome v7. 0 (chr-ID scaffold_9; pos 2174756 to 2175092 reverse stran d)
tcaacttccctcaatctcccttcatcctctttcaagtaagtcatcaaattaacattcttttctacttcaaatttgttaaattttaacgagtttttgtatattttggatctgggtagttttaatttgataaaaacacattcaattctatgcaattttagcgtatttgtaacgttggcatgttttaatttcatccaatattaatcattaatctattctttaggtgattgtgatttgcaatttctgattcctttcagttcataattggtaaaaaattactgttgaaatggttgcataatttccaggaagactgtaattttagcagctgcaagtcgttgaa

SEQ ID NO: 14423 - DNA, 1568 bp, Aquilegia coerulea
  Intron number 6 from transcript AcoGoldSmith_v1.018485m (l ocus AcoGoldSmith_v1.018485m.g) derived from phytozome v7. 0 (chr-ID scaffold_30; pos 913078 to 914645)
ctgttattgaggtagcttttgtttaacattcttgtatttaatttattttttgtttagaaaaagcctttgtacctcatatttcatggccattttagacatgttagtatgataattgaatgcgttatgcttacaccggtgaatcctactagtgctacagaaggtgtaccctgtcatccaatagctgtctggtagaccaagattcctttccttttaattgtgtagaagaccttccacgtagagctactttctcaaaatataaattgcagatagctttaatgatcgatacattcttagaaatcaaaacacaaccttgaacatcctttagcaagattttatccaataatttagtcattattgccgttaattttcatgatcgacacattctcagaataaattgccgttagtttccatctaataatttaaataatggatctagggtcgtacccagacatcttggaggagcaattaggaaatgggatgggctggagggttccagagaagggagctgactcagctgagagggttcattattctgagtcgtccatggtagctaattaggggaccagaacgaagataaagataattaaaatgccaaagaccagattctggggtatctgaggatgggtaacccataactccataatctttgcttctgggatcatgacacttgtagatagggggtcttttgtgtgtgatgaggcggggtcagtgtatttccagtctacactttcccctgaagcacaactgatcctccaaactaaattttagaaccagttgcatctttcaaatgttcttgaagaacaggagtggaattggagattgttcccttatccaggtatacgatgtgttgtgtgagacttgatgatgaagtttgtagtagaagaatatttttttgtgcatctaccaaaatttcatccgtgacgtatatgttgtagaggtagtcacatagcaaaaagtaagataacattgcaatgtggcaatattacatcttttcaccctagttttggtcctcataagtcatatctgatcctctcacattaatacccaacaacaagatttatatgacatgaaaactgccaaaagtagagaagatgtcttcgaaatatggttctttgtttcctttaatagcctccaatgaataacataaaattcaccttatgataaattaatgaacaaacttttcccattcgggaggtggtgactggtgactgtaccaagtatattaatgtatacacatttccagtcttttttatttatgttttgtgcctccattatcttctaagattctgctattaacctagaaagagtaaataaaatagtgttactgttttttcttttccactgatattataaatttctatctctggtgacatttctcgtggtcactggaccatgagatcaacagttatggaatatttcgtatcaatggagatcttgctttgtttttacagtttcttttgttaattaatcttgctacgtgacaagtttcaagcaacttcattacagcttccttgtatatgtattcttttgcaggattttgaagccttagaattcatagagtgggaagc

SEQ ID NO: 14424 - DNA, 2307 bp, Aquilegia coerulea
  Intron number 2 from transcript AcoGoldSmith_v1.008816m (l ocus AcoGoldSmith_v1.008816m.g) derived from phytozome v7. 0 (chr-ID scaffold_5; pos 7144477 to 7146783)
ctacaacatcaaggtcggaattattttcaaaattgtgctgttttttttattgtttgattgtattcactttaacgatttgtgaatctagagtcatggactcgtggttggttacttgatttgtttcagtggacaattgttctattaaaatttggattttttttttttagatttgcaaagttggtgattatttatagcaaaataattactattactaggcagaatttttgcatccgtgggcatttgagtttatatcccatgagaagtgcgttagtgccgtgaagaagtattacttttgaagaaaaaagttattctttctgaacatgacaacatggacatagatttagatcagggaaaggtgtgcttgctaataccctctatttcatatatatatatggtgggtagttaagtgtttaaaatctgattgtgatttgtaaaggttatctgtgccatatgaaagaaaagtacagagtcggcgcaaggcagactgccttgacgatatcctttttattgtttcaggaggagagggatgttcgcaggctatggttagttggttttcgtagttggttgggatatgttgatagtgttaagtgtaacacttggggacatcttgttgtttgttttttttgtttgttgtcttgtgggaattttccccattgttgctctcctacctcttggacctttgttgaccgcctgacccaaacgataatatttcggcccaatgcatgcttactttatgggttgttcttgagggcgcttggtttggtccatggcgtagtggaagagcactgagatgtagttgtactcattcttacatcttgatgaatgattacatttttagcgattataaaaactttgcttcagggaatcttagacaaatgtggttgctgatcataaatactagtctcaggtcctgttcttaagaatttgctatgatgagctttaagtagagaagtttgggcagttagtttgttatatctcagtctctgttcttaagaattttgccatgatgagctttaagtagagaaatttgggcagttagtttgttatatttcacattggttatgagttatacctaatgcttgtgaaagatagttcctatcattgaatgtttaaaacatctgaaattttagcttagcttgttattcttgcagattaacatgagttttgtgctatttgaaccaaactttagtgggtccaagactccacggcttagtttgcttgatagttagtttcaccaccaaaatcaaatacaataaaatctttgttgccatatcaaaactgcaaatatgtaaagttagttgcagaatctttgataaagattttgattgtatattgtgaaaagtccgccacttgaaccaattcgtttggatcacctttcttcaattcaagttttagttcaatcgggatgtgattgcattgagtatagtggtttaactagatagaatatttgtggtcccaccctcacccacctacacacattattataccctatgaagcacggacatgaacacgacacgatacagacacactgacacgtaattttctcaaaaagtaggacaccgactcgttataatatacagactttatttttagttatttttagcatacaatattttttctaggataacaatagtgtacaaacaacaatgtggcattgtcatttgtcaaagttaatttgacaagagaagcaacaaagtattgagaaagatgaagaatacaagagaagcaaacttagagagagaatacggtgagacttgagagagaagtttctggagaagtagagatcttttagtttgtttctctcaccacaaaaagggtttctttattctatccctgcccaattctattataattagtttatgcctcttgcaatcttaagtaatatcttctcgcccattataaaaagataaaattacaaagtaatgcctgagccaaggtgtccagatgaagtgtccggcagtgtccaggttagagttttttttttttttttttttttttgaagtaagacactatatttgaagtgtcggacacgtcccaaggtgtcttgagagtgtcggtgtcagacacgtgtccgacattggttatgagattaaggggtgtgtgtgtgcttcatagattataccttgttcctctgtttaatattagtaatctttaaagaataaaaaaatgtgtatctgctgtaactctgtaagttctctttgttatcctagtcattttatattttttatcttaagtatgccattttcaagctcctgttctttggtgcaaagtagttaatcatgcatgtattgttcaacagtacgaagg

SEQ ID NO: 14425 - DNA, 1577 bp, Aquilegia coerulea
  Intron number 4 from transcript AcoGoldSmith_v1.001567m (l ocus AcoGoldSmith_v1.001567m.g) derived from phytozome v7. 0 (chr-ID scaffold_61; pos 1189086 to 1190662 reverse stra nd)
gcttagaactaatatcctgcatatcaaatcaggtttgtatcttatttattttaatgatatgggacttttttattcgtttgtactttgtagcatacacaaaatcacaaattattgttgtatctgaaaaccatttaaacctgcagttttgcaaatgtcttaatattttaaatctatacacaatttcagatatctgggaagtacttgtagatgttgtttcagtgctgcaacaagcagaaggcagtgttaaaaggcagtggcttatggatgcagtggagatttgctttattactaattatccctccacggtatgagcttagttctgaaatgctgttcgtaatattctttaataaatttggatgattttttttttggcttgagtaaagatgtgtcgaaaattagagatgttatgagtgggattttggactgatctccaaaattttgtgcttaatataattgaaaccattgtggccttgtgggtatgtttgagtggagtaaagatacgtggaaaacaagagatgccaagtgtgttagttctgaaagagggctctttgtttaagaaatctatgttgccactttcaagtcacaggtcactattaaattttgtaatataacctaattaatagttatagtatagcaagctaggaggcttttattttaaatttaaattgacatttacttgcagtttttggtttctgacgtgatttcttcatcacactagtctccatatcaaaataaattgattgttttgctgataaaaaaacaatagtaagttctaactagatgcatataaataacagtcttgccgtatacttggttcaccaaaagtggcatcttatatacatataacctttcgatgtttgagaaatatatgttgccagtttcaaacacacaagcagttagtacggttggaattactaatgtaccttagtgattatgtataatatagtaattctcagcaacttttgctacagctacagctacactatttgctattttaaatactctttctgtggtgtcaacttctgttttatatgctgatagcctcatagtataggttgttttaataatcgattctgtggagtccagtatatatgtatcttgactttagaaatttataagagaggtttgcctttccaaaaaaagttgaaacaataactatatgcatatagtgtcaatgatgtcatcattaacgacgcgtcaagtgtttttctcaaacaaaatttctgttattttttatttagaatattaattatgttctatatgtttttgaatttggttcactagtaatttcctatcattgacctgctaaaaatcaaaatcattttaatgtgttgccatccacaaactggtttcttcagttcacctttgcacatgccatctaaattacctgctgttttcttaattttttacatgaataatctgttatattttcctgctttttcacgcaggcattgaaatttattgggttgctagccggtagctgctgtagatatatgcctcttctggttctagatcaagttactgtgttgagtgatttacctgtcacgctcccttctcttttctcagataacaactgg

SEQ ID NO: 14426 - DNA, 1712 bp, Aquilegia coerulea
  Intron number 2 from transcript AcoGoldSmith_v1.016546m (l ocus AcoGoldSmith_v1.016546m.g) derived from phytozome v7. 0 (chr-ID scaffold_45; pos 1574440 to 1576151 reverse stra nd)
tgtggaccctggcctaaaaggtgacactgcacaaggtaatactgttcattatcataagaatcaacccttgcttatatttcttataaaattgggattcttagaaatctttgacacttggccctgcttggttgccctgcaaaaatttatcaaaaaagtagcctaataaaataattgatgcaaaagtttggtgggtttataaccaaatcatatatacaagtgatgcaaaattttgatgccattatcaaaatgcaaagatttttttttcacatgaatttggtgaaagatcatctatgattatctcatctttatgctaggtttaggtaggaaaccaaggatttgagttaacttagatgggagaccattaggatgaaagagttagttaagtaggggacctctctagttatagggtggtaacatatgcttttttgcagcccaaacaagcagggcctttgacgcacaaattccacgcattgctaatgttacacagattggctataagcttagactgttccatgcattaccattatagattggctataggactgtagtgatgtataagaaagcacattacgaacccccttataaatggaagctgtggcttacaaattcaagaagctaggttatatagaaatcacaattcccaccacgatgtgaggctgtgagcggagcttcccaggacctgaagtagatcaaaaggatcaatggtactgttttggagatagcaaagattcaaatgaggaagtaataaatgaaacatgtgagtcattggcgaacaaatgctcagttcaggaaaagatgattacttggcttaaatattctagaacgataattcatgtagtctgaatgcatgttcttaagggcacgaattcttatttgtagtttggcgactgttgttggaaagcttttctcattgttttcatgttactgaccaatgtgcccaaaactttttattctttggatttaagatgtttccagttcaagttatattttaatttccgtgtatatgacaaaatcatcaaatggacatcttgatgaaaagcgacaccactttaggcatgcaaataggatccttagatagagaattacatcatacagtcaaggtttagctgagaaaatcctagaagggttcaagtcattaacaaggcctaaaaaccctgaagtaatttgtgcagctgctagaatatctatgcatgttatatagaccaacagtgggatacatagagaagaacatcagacagttttttaccttagtgaattaaaatagttcatcaggatcaacaactagtggtaggatgaactacttaagtaaattgtaccttctggccatgaccttggcatgtactgagaactacagtaaaaggtataacaatggcgattcttatgattcattagtctcaaacttcagatcccaaaccaccctcattgatatgagagcaattatgttacaagtgacttgatgaacttgtttttattctgtagttgagtgttgtgcgatgcaatcatgtacaaataccacatcctgaccacctggtaccatatcatattgcaacctttttactataattttgctgtacaataaaataaaatttgtagaacatcaggtagcaacaaataatttgggaatctatgttgagttcatataaactaactttccaatgtaatgtttttgtctaacaggtggtggatcgaagccagcaacagttgatacagga

SEQ ID NO: 14427 - DNA, 1160 bp, Aquilegia coerulea
  Intron number 1 from transcript AcoGoldSmith_v1.009649m (l ocus AcoGoldSmith_v1.009631m.g) derived from phytozome v7. 0 (chr-ID scaffold_32; pos 950447 to 951606)
gcgaaggatttctcttgaacttgaacaggtaatctcttatctgaactcttttgttgatttttatttctcttctataactcctcttcacaactttctacaaattttggggttagggttttactgttaattatatgctgtgagaaaaaggcggtggggggagtcgcggtaaattagataaggcgaggttattctttgtttgatctgaatcctgaatctgaattgccgatcgagtcgactaggtttcattttctctctctctctctctctctctctctctgtgatggagcagttgtctggtcctcctttgcgagcacgagcatactatagtgtagtaggaaaaccatcaccaccaccatcacctccttcttaatgagtccatttcgacgttttgaaaatgtaacctgtcgatttgtagtattttctattctcttaatctgaagtttaacacgacccatatgtatgttctaagaaaaggtaattaaagactttaatttgtttaatttgataagaataagaaattcagaaattcagaaaaaaaaaaaaaaaaaaaagataaaaaatctgaagaaagcaaaataaaaaaaaaacccttaaaaaaaaaggacagagagagagatggacaagaaatgctagaaagtggagagacgaaatggtcgaaatagagaagggggtttaatggcaatagagctttgtgtttactgtttacccttgaagtgtggagtagttgcgcaccaaaatttactctttataaactaattgttgtccattccatgtatctctagctcttgatgtgtgttcttttcaaaccaacgaccctgaacacagaacacctgccagccctcttttcccctgcatgtgatctttctaatattgagttattatttttatagctgtggagaatatacatttgttgttgttacctgttcagattgtattttttttattttgttgtcgccacacttattcaagtttcagacagttttcatgtcttgaaattttagcatttactcatttacatttttctattttctagtgtagaaagaattcctatcaacttttctcttttatgtttgtctgatgtgagtcgtcagtgagttatgtcctttcacctgctgtgtctagtgcatgatgttgcgtagctcctggagtgtccaggttcg

SEQ ID NO: 14428 - DNA, 2990 bp, Aquilegia coerulea
  Intron number 16 from transcript AcoGoldSmith_v1.015647m ( locus AcoGoldSmith_v1.015647m.g) derived from phytozome v7 .0 (chr-ID scaffold_21; pos 1084066 to 1087055)
ctgcttggggtagtgcgaatcagatatctacgcaggtacaaactgttggcgattgttgaattgttgtatgaatgatctgcataactatgttagaataatagaatcaattctttgttctctgttgttatttacttcctcttatggcttcatatgttattccataatcgagaaagttgtgtttattttaacaaagttgttataattgtatgattcacatatttatgcatgaacaatttacggcgttccctcacacgatgcttcctttacaaaatatcaacaagttggatatcattaaaattccaggttgggatgacgtggaatccataattatcatcttattcagggtgttttatatgtaaaggctgagggactatgtctgaggcgcttgcatgagtctcaccatgcgttatttaatagatgaccttggaggtttggtgggtagagagggggagagataatctttgtaggaaggagaagaaaaacaagaaaaggcaatacctgattttgtgcatcttctctttatcagtctcaaaatctttttgttgaccagggagctcagtaaatacttttgtctattgatttctttgtcgagatttgcgatgattaggagatactatctgttggtcaagcagtaggaaagggagatacgatctttggttcatgtagattgcaccatgtatatatcaatctctaccttgtaatgtggccgatgtattaattgctggccttaatacagtatagagtcaatcttacatcataatacggtccatgtattttatcacaaattaaaagccatgaattcgctcaatgcaattaaaggttgtaggttcttctatcaaccagccatgagagattcattttgtagaatttagggtcattttgccaatacatcccataagtaaaaaaaaaggttttccaccctatttaacagcttgacccagttaaaagaaacagtcaacttttgttgacctgtcaaacctctaaagtggccaatataccctcaaatttcaaaatacctaagttgcccttatttgatctaaaccgtcaattgaaatatttctcccagatctaatctcagtcgttgattcgtatgtacgaatagacggttttaccccttttcttttcatctttttacttagacaagaaattttttccctcttttgctcttctattcctgccattaaaaccctagaattctaggttttttactctttttttgaggggtttcaaccattccagtaaatctttgaagtttgaactcaaaatcaacctaaaatcaaccaaataccttataacttgaggaagaggcagccattactagcaattctgaacttcaatttgttgtattatatgtggggttgaagaacatcaagttttgaggttttataaagacgaagacgacgactatataataaacgactttaggttgctattactacagttagattaacgtctttaggctgcagttaatatagttagattaaaaattttgttagtggctttgctttgatttcaaagttgagtcgagtttttggtttctttaactttgagatgaagttgtatatagttagatgaagttgtataaagacgaagacgacgactatataataaacgactttaggttgctattactacagttagattaacgtctttaggctgcagttaatatagttagattaaaaattttgttagtggctttgctttgatttcaaagttgagtcgagtttttggtttctttaactttgagatgaagttgtatatagttagtagttctactactgttaaagaactccccccccccccccaaaaaaaaaaggaatgattttgtataccttttcttccaaaaactttagaaatgggattaatggaaatttttttccttttgttgattgcctttctcttataattttagtgggtaaagtcttttagatctagattaaatgaaatgggtatggcagatcattgaggaagaatagagagaattgattggttttgttaggcttttagaataattatatttttattagggttaattttgttatttcctttttaggggtatataggtcactttagaggtttgacagggtcaacgaaagttgactgtttattttaactgtgtcaatctgttaaataggtggaaaacctaatttttggacttatgggatgtattggccaaacggaaacaaaaaaagggtgtgttttgtcaaattgaccctagaatttatgttgagatgggatacctttacttacactgatgcaaatattgttcttttgtgcttagtgtgaagttccgttcactttatatcatgaatattatatattttttttccttgccaaaaagaaagaagaaagaaaataaagtggtcgtcctacctctttagcttggaatacattgctctccacccatgtctgaaactggtgataatccacaatgagtcataggtgccataaatgtttaagcacacttaattacttttgctttggaacacatatggtgggtctacatagatacaaatttgttttatgtagctttagtatagatcccaaattttcggtctccctactctctttctccgtagtcttatataggccacacctctttctttccagaaacttgtaagttagaaagctagatagaatgacttttctccagctgtcggtgactcgaagttgatatggatggacaagaatgggacgcgctaaaccagaaaagcctaattgctattgtatcctgtaatcagtaccacagattagctttcactctcatcaagtcatcagtaatctttaagctgcagctccaaattcttgtcatcttgtgttttgcatctaccccgcccatagtaaacctaacttcaatttgttcgcttgaactacactttgtcttgtatatcaagataaaaattctcttctttttagttttcttgcttgtgtaattatttatttcagctcattattaactaatcatgtcaagatgtgaatattgtaggttt

SEQ ID NO: 14429 - DNA, 1204 bp, Aquilegia coerulea
  Intron number 7 from transcript AcoGoldSmith_v1.001236m (l ocus AcoGoldSmith_v1.001236m.g) derived from phytozome v7. 0 (chr-ID scaffold_5; pos 8251474 to 8252677)
agagttgctcctttcctgaggccggtaatagaagtgtaagtttttttccttgacaagcaatttgttttcctaccagatttgatatatattgagtcatcaaatcgatatctagctatatctatactactattataaacctgaataaaattcaggggtaagtccccgttcatgagaattgagctttaaaattttgcaacacaaatctgactaaaataccctttagtcatggttttattgtaaattcacataatacccttcaaataatagttttatcgtaatttaatatatgattatttatgggctggattttatttatgaacaggaggcccaaaaatttaaaacataatcaaattaaccgcaaatattatgaaaaataataatttttaatcgtaaacttctatatgaaaatataaaaagaaactacccaaatttatttcagaaataattgtttcataaaatttaataaattaatctaattcttaatttttactaacttacaagtgtaattaataacttaaaactcaaataaataccgactagtaaaaactgtatacttaggatgaaaagtagtttggtattagtaaatcttccgtgtctaaactcacagaatacatttggtccctcaacttttaattagaaatccaatcaagtgaatattttagatattggcatagagatatttccttctgtgttaaacattgaaattcttgacctagtttatggtaattttaatttttgaatacagtatgttatgcgcaccattgagatacccatagttcccattgctgaatctctaggttactcacaaaattatataatgtaattttggggtgactatactgattgattctgaaacccagagaggaagcctagggtttttcaccaaaagtgactttggcatatcaggattcaggttttttgtcttaatagattgtacatcttgtgatactaaagaatgggacccctacaatctgaggaatttcattccaaatgttcagagcttcaagtagattctgtctgagctcttaattgctttgatcttaataatattagattgatcttaatttgtgattttgtcaatcatatgattgttttatcgacaaggaacaagtaaggtatctttctaacttccatttctctataaatactatggacgtcatgtcatgcaggaaggtgatcaagtcattcctacaaggtttccttc

SEQ ID NO: 14430 - DNA, 1017 bp, Aquilegia coerulea
  Intron number 1 from transcript AcoGoldSmith_v1.011535m (l ocus AcoGoldSmith_v1.010839m.g) derived from phytozome v7. 0 (chr-ID scaffold_27; pos 3015901 to 3016917 reverse stra nd)
ctctttgctatcttgcttgcttccctccttgatctgtaagtctaatggtttctgtttctcatttacatatgttacgctttattatgtacttgatttgatgagattttgttggtaggctttagatttggtgttattgatatgtttctgtgttgtgttggttgatctactgagatttggggtaattttcttagttatattgggatatgtttttttatttttcagatcgaattaagattgcaattgttttgaattatttttaatgagatcagcttgtaaatctgtaaaatttgtgcttatgatgttttgcatcataattgtttgatgcaatgggtctgtgagttaagttaattattttacacatgagcaatgtagtgaagtaccgaagttgggtgatggttagatttgagaaatatgtaaagcattgtaatgttgtttgttgagtgtattttactaaaatgattgttttgaaagaatctttagaaactttgtcctagactaatgttttatttgtagaattacattcatttttgagtttacttgattagggaagaaaaccccattagtggaatagtggttcgttggtttgccatagcagatgaatgcaggatttttttttttttagaaattttgaagttcttaatgtgtagtgtctattgtgggtttcacttagattagtagaatgcactttttccgtgttgatgaggatagtagtcttcttatttttggatctcagtttctttttaaatgacgcgacgatgatttattattttttttttttgaggggtcagtggttgccaaacaaataaatatatgttggacttacttttgtgtagaatatgggttcctgtcaggttggatatgcttctgttttgtttcgttgatcaccatgattctttaaatttttgcatgccacccatgtactacttgtgtccttcattttgttgatggttctttatatgtgctggccgaattttatttgcagattcctacttgaggttgatctcattactctcctga

SEQ ID NO: 14431 - DNA, 943 bp, Aquilegia coerulea
  Intron number 3 from transcript AcoGoldSmith_v1.024130m (l ocus AcoGoldSmith_v1.024130m.g) derived from phytozome v7. 0 (chr-ID scaffold_4; pos 7913342 to 7914284)
gacaaagttaaggtaagcatctatatctacattttcttgtgtaaaacatgttaactttaacactaatagcataccatcaatgaaaagtacaggtaacaccttatagctccatcccacttactttggttcagttatggaaatgatgtatatctgcatgataatatgtgttgcatttcctatcttgaatgcctttcagtgagattcttataggatattcctgattttatgtaggcagtaagctattgagtctcggtcacttatccaactacctgtaaatatacaacaagaatagcagtgagccagtgaccccatgacagtgaaatctattaaagagttttgaaatgcaccatgcatatcataaggtggtatccaacccacaaggaatcagaattaaatatatcagggtcatgagttttaatgcaatcagaattagaaaaccattgaatgcaatccctctcagttcttttggcatgcaccaattgcattaatatcattttgaaagattgattgtttctctccactctttgacagaaatatttcaaattttctatggaccacattgagatattctcaagaaatgaacacatgcactctttgtactttcttgtttgaaaagtctctgcctgaaattggccacacactatagatcagagtaatcgtactgcacgtttgattattaactacatacagtattctgaaaatattaacttaataactatcatgctccaattcaatgtgacgatagaggagcatgtcaggtgttgatggaccagacaaactgttggagtcatcatcaaactgttggcatgatataaggcatccaatcggcttttttttctttggttagatcatgtagcctcattaaaatgtgaaagaattgtagtgtatgaagaacaatttaatgttggcttattcagctttgtttctcatgcataaatagggt

SEQ ID NO: 14432 - DNA, 464 bp, Aquilegia coerulea
  Intron number 1 from transcript AcoGoldSmith_v1.019969m (l ocus AcoGoldSmith_v1.019969m.g) derived from phytozome v7. 0 (chr-ID scaffold_67; pos 1003887 to 1004350)
aagcggaaaaagttcaacttttggacattattttaagcgattagagaaggagttaggatcttaagtacatgaatttattttttggatttcgattagtatgtttttgagattagaaaaaactaataaataaataaaactcgtattagtatgtgttcgagttcaatatgttttggtattttaattagtatgaattttgatgattatatactgttggaattttgtttagatggtttggaagttatattttttttccccttattattctttgattttattcctattttaaagtgttcttgtatgttttagaacaaagatatttgcattacatttatttgtagattcatattaatttaattttttttttatcttttcttggtttttagttataatgacaccgaagcaatggttgttggtaagactagtggcattacttattttgcttaagcttaggactccttgtagaa

SEQ ID NO: 14433 - DNA, 1606 bp, Aquilegia coerulea
  Intron number 2 from transcript AcoGoldSmith_v1.022607m (l ocus AcoGoldSmith_v1.022607m.g) derived from phytozome v7. 0 (chr-ID scaffold_6; pos 7515210 to 7516815 reverse stran d)
ctaagtgccctgtcactggaaagagaatccaaggggtatgtttttttcatatgaatctttattgacatgcatttcatatgtgttatactctttcatgttagggtgtaggttattttgttaaggatgtggtatctgccaatggcgtctttaggagttctgtaaatgcattaggattgctttgctcttgatagtagtccagtaaaaaaaatgagaattgattgtagtttgaatgccttctgttgatgattttgagacctaagtggtatttatttgtctgtaagttcacgggagcttaattaacaattcatcttatgcaatgcattcatcccatatactaagattatagtagatgtgaatttttacattgccaccagaaatcacttctgtaagaggttttcctattatgtagtacctttcattgaaatagtcgatgcctgacataaaattgatcttgtatgaaagtttcatgggaatgtttaaacactatcttagtagttttaaaatgttttctttatatatttattccatgttaggtattccataggttctgttaggattgtggtcctgtatatttatttttttaccgtaaaagtttgattagttcggaccatcagttcatagatagaaatctttctatacttgatgatgtgtagtgttgtaaaattgtgcttttgtcaatgctgataaaaattgtttattgcctttgtatttaagatttgacacttcagcctgtcattgggtttgcataagcctattttgtcttggattttacaatctatacaattatctctattagttaagatttaagtctagttgcttcaattgtttctgaataatatttgtcaaatgcgttctattaaacatgtaatgtatggagaaatgtgccatgctattaaggaaagggggcttcttttgtcattttatccctgcacaaccatattcaacttgtgaattatctactgttttattgattactttttgtatcttttatctgaaatttcaaagtcatttgaatccatcattatctataatgttatgttcattgatatagtaatattcaaccttatatagcaataggctctctacatgtattgtttttctgttccttaatatgatttgatcttgttttcgttttgaatcttttctttagaaatctagtagttgtatattgtaagtgacggagatggttttctgggtagaaaatctctcagctttttattacatttgaaaggagcaagcaattcatccatgcttgtaaattcctaagtaagcgtcacaaatagaataaccttgtttgaaacgttgatggttcttttatgttcctccgtttagaggatcattgtgccatatctcatcgccttgtggagcagcgttgttgcttttaccatttgggacttgccatggcacaaacatttcaagttgttttcttactgcgttggtggaggattattgatagtattaaatttcatcgcacttttattttgaagcctgccattctgttgtattaaacactgatccagctttcttagtatggtcataataatttgtcattgtttgcttttggcatgcagattccacacttgagacctgctgaatacaagaggac

SEQ ID NO: 14434 - DNA, 3204 bp, Aquilegia coerulea
  Intron number 1 from transcript AcoGoldSmith_v1.001193m (l ocus AcoGoldSmith_v1.001193m.g) derived from phytozome v7. 0 (chr-ID scaffold_6; pos 2194589 to 2197792)
aaattcaaggtgctaataattgttctttcctcttctttcctctggttaatttgtttagtgtatatttcttgctattttataattacaagttcttttaaaggtaaggtttatagagttcattcggtgctttacgtttctcatatcttaattatttttacttggtggtgctgcgggagggtcacttccctgatttgatttgatttcattctaattttttaccctacattcttttcgtttttgcttgattaataactattttctatcgatgtttttttccagttttatttctttttctttgaggggtaaggtggtggccagatgagtgtgtttcttgaatttacaatgtgaactaatgtctcacagccaatttttttatcttgttccttggtgtacgaccaatatcaacaaaaagcaagaatgggggtagaatacaaacaacagaattgaaattccctagttccctacatgtccctccactgcttatgccaaaggaacaacaatccttggatggtcaaactttctcctgtgagtcgcacgtctaattttgaaccgtctgattccgcaccagacaaaatacccaaatcataaaacaaccacaacctttctttgcctcaaaacgactttttcaaggaagtgaaatgaaagaaaaccctgcaaagtctgaaaacgaaccttgcctttcagaaaaataaaggagaaatcagtagagcagaaaacctcccccttgttacctggaacgtgggttgcttcggttactggtacacagtacctacttccacggtacctgggaagctcgggtaggcagagttggtatagtatatcggatcgcggttcacattacgaactggtacttgaactatcttaatatgaaacctgatcatcttacgtggatatctatgtgcttgaatacaatagtacaaaaatgtattcataggtcaagcaaaagttaaaaaaaaaaaaaaaaaaaaaaaagaaaacaccccaacttttaatggagtgatagtggtccatgagagaagcattgtgttagtctttttcgccgtttggatgcgattaaaagcttgctctttctttcttccctctctttctcagtgactctcttggatggcctttgctccattagaagttgagctgttgttttgcctttgctcgacttgggaacaacagtgtatatgattgtttaaagaaaatagtcgccacaaggattgatcctagggtacaaataaaaagataagtataggaaaccttagtttggagcaatcacaagaagcgactgaggtttcagatggagatagttgaagcataactcgccctacctgttactgaatagcttccttcctgttcctcaatcattgacatatttgggcaaacacatctcattgaggttgggattatatagtgaatgcaacatacgccaataaatttccaagtaccagtaatttttggctatattatagttttgcatacaaaagagataagtattgaactatacagctttcatgtagtgtatgtcttagcaaaggttaactgcatggctttttagattcttcttacctcccatcaggaacgtcagattcgatgaaaatatgggagcatttgatcttgtaattttgtccattcactgatgtattatctttattactattgatgtataaatattttcttaagcactcttcttaattacctaaagttatattttttggatgtttttgagattagtatgatgaatttgttcattgtcttagaaaaggtcacctcatctcgcatctaccaattgtttttgtgggagtcggtggctgcttctcattcatgactttgaatgcattggatttgtattgatggagtgtcatttgaagaataactagaaattataaatgcattgttttgaatgactatatatatcagcaaaaagagtctgaatttagacagttattgattagaatttttgggcagagtgtgtgtaacagttactaatttccccagaacattagtagtatgtgtcagtttaattaaaaagtgaagcaatctgtagcttttatacacctctttcatcgtaaataatagcacttaaatgacgagtagatctgttcatcacttcatcatatgggttagtaataagatgtacaaatcatgatggttgacctttctcagtggagttttctagccaaactcatgtagtaccaaatgtccaaaaagatccgctgggttaaatcaacatataatattattagtgttatttttactttggtacctaagatatgacaaaccatttgtgtgttcaaagctatgctgtcaagggcggagcgaagcgccaggcgcccaaatttttgaagaccgcctccaccgctcaggcggcgctcaggcgacgctccgatcagacctgatgtttactaacagtatttcattctctgaatatttctatacagtaaactgcaaatttgcagtccgcaactctataaacactgtttactaacaattaaaagaagaatttgaatttgatttgaaaaaattaaaagaagaaaaaaattagatttggatttgacttgatatgaatttgatttgagaagattagaagattagaagaaacttagatttagatttgtcttgatatgaacgaagtagccgccgtagtaggagagacggagagagagagagagagagagaccagagggaaaaccagaggtttttattttcttaacttttatatgggcttttttaggtttgggccacccctgagcccgtttatatgggccgctctgaacagagcgctggacctgagcgccgcccaggcgacccaaagcgttttaagcgctggtttcacccagcggagtgtcccccttcagaaatagtgcctaggcggcgctgagcggcgctcaggcggcgcccctgacagcataggttcaaaggccagcatgtgtacatcatgtagtattagaggcacctaagataggactaactttagaaagccgatatgtgtacatcatttactgtatttgtagtctgtacatggtagtctctattttatagtgcaaagctgtaaaatatcaaaaggttgtcattgcattagcatactcactgaaagcctgtatctttgttagttgttacattcgaaacaaactttatgcaaataatgtttccacatcgcatgcatacgacgtgtttctaacttccaattctataatttcaggttcaactgctactggt

SEQ ID NO: 14435 - DNA, 1223 bp, Aquilegia coerulea
  Intron number 2 from transcript AcoGoldSmith_v1.011928m (l ocus AcoGoldSmith_v1.011928m.g) derived from phytozome v7. 0 (chr-ID scaffold_21; pos 4025222 to 4026444 reverse stra nd)
ttcttgctcgtaagtatttcttctaatttgattctgtgcccattgtatttgtagtttttatataatgggagctaaatacatactatcttttccaattcagtactcttatcttgctttttatgataaagtactgatagactaaaaattagctgatgccattcctggtgttttgtgttatcgtcaataattatgtgaaaaggccaaaactgatgaacaaactgcttttgtgtaagctgtttaggttgattgctgcaacgtcttatcatgatgtagcatattgttgatgttgtaagctgtagctttctggtgtagtatatatcagagattcagaggcgagaatttgaatttttgtttcctatgttttagtcaggcctgagagcagcaaattgtcattccactattttaatgttttaagtgctatcgcatatgtgatagtaggcactgatcacactgtaaattttaaaacaaatttcattatggttattttcaactttgtttactgcaacacattatggcattcctgttgaatgatgtttgtagatatcgcatctatgcagtcaaagcaagcctaggatttagaggtaccctttgtgatgggaataaaaggtgtctaggctgcatttatctatcacacagagttgtcagtctcacacctaactcctaagctcaagcctgaaatctaggtgtttttctgcatgagtgtctgcatggatgttcttattgtttctgtggtggtcttattgatattataaaaatattgtcttattgcattttgtgctggtgtgccaattaagttactgaatccctgaattagtgttcatgtatgatgagatgtcccaggattgcaagcatgaaaaattgttgttggagtgagtactgtggtgacagtttgtatgattgtgatggaccttagggaacttaattttggtgatgcaattgctttgttagattttgtgcagatttgaaatcaagctatttcaacttaaaaaataaagaatcattagcaactgatagtcctactgggctgcttaaccaaagaggaccagtagtttgtgaagttaggttaggttactcgatggtttttactttttagtggttcttcagatgtttgattgttccaagttccttgcattgcaatttgttgattttttttatcaaccattgaactgttttgaagtatagagcaatgttcattaatagtttgtattctaaaatttacacag

SEQ ID NO: 14436 - DNA, 933 bp, Aquilegia coerulea
  Intron number 2 from transcript AcoGoldSmith_v1.005964m (l ocus AcoGoldSmith_v1.005964m.g) derived from phytozome v7. 0 (chr-ID scaffold_42; pos 456232 to 457164)
tttctatttggttctacgagctctcgataccgttggtttgttctttctttactctggatttttgtaattgatgaatttgaatctttatgcttattattttgttacacgaattttgatatataagttcagttttcgcgattttgaaatttagtttaaattgtatgttcttaagaaaaaaattggttatagtttcagcattcaactcaaatttagctttgacatgattgctaatcgttttgaaattatactctacatatagtcgagaagttcatgtcgtattctttccgtgatatattcgatatttgtataaactgtacagaaaatatcacatttgtaatgttggtaagggtcctccatcagacttgaatacctacaatgttcgtatgattttatgtcttctctgtaatttccaaaagtgaggttttatatgagtttaaggagctttgggtggaatttgcagtttgtttcccatcagtgtaatgtaaactagtcttttcaataaaggtagtttggtaggtgggggggaacatgttgcaagagaaggcatgtactaggtgcactcatagttgtaaacaagtctatctttaaataacgcaatgtggtgggtagggggaacattttgcagcagcagttgtaatgcctgtttcttgctattcacacttttacctgcatatgttgaaaccgaatcacttggaagtttagtcctacattcactaacaaggctagcaataggctttcagtatataatgtttctgaaacaaggaaagacattatatcgttcatcttactacaagtttgcaataataacagtcatatcatcatttgattctgaggtattaaataaataaaatacaaagttcgtcgaatgatgatatgtgtttcttgtgttcacctttttctgttaataatcgccctgttgttattttacagagg

SEQ ID NO: 14437 - DNA, 493 bp, Aquilegia coerulea
  Intron number 1 from transcript AcoGoldSmith_v1.024657m (l ocus AcoGoldSmith_v1.024657m.g) derived from phytozome v7. 0 (chr-ID scaffold_2; pos 4345410 to 4345902)
tctggaacggtttataacgggtaaatcctctcaccttagtagttactaccttagcctgaatttttgttcaacaatgtctgcttacaacttgttatgattcaattttcattttcttcattatttcaatttcttgcttaaaaagttgtttagcaagctgaaatctggatagtctagtaaacaatcattgatgcagacttgctgggtacatggggggggaaagagtcgattccacgtcactgacaatgcttgttttcttgatttcgattttaataatagatgcatcatcacttcacatgcgaagaataatttgatttcacaggcaataagtcattaaggaatgtgtaatgttagtagttgaaaatttgttaacatgtataacatggctagcgttgaaatgctctgcaaggacagagtattccatctcattgtcaaatcctaaacatatgtgctcagaatttataaaatgatcaaataaattcatccagatatttct

SEQ ID NO: 14438 - DNA, 368 bp, Aquilegia coerulea
  Intron number 7 from transcript AcoGoldSmith_v1.001194m (l ocus AcoGoldSmith_v1.001194m.g) derived from phytozome v7. 0 (chr-ID scaffold_9; pos 4724590 to 4724957 reverse stran d)
actgggcggtgagttatgacattatgttattttgttatcaccagatctacgtatactactgcagtaaaattctgtatataataatctatacggtattgttacttggtttgcattatttcgtattcttgtctttctaatatctagctagttaattagttcgctttaactatatatatggaattaccagttagttgaaattcattactaatggtttgaggaaaccaagagacatttaggggaaccaaactaaaattgcattcagttgaatggtaaattggatgaatgtgatttgtcgtttcacttatatgttaatctctggtcgtgattttgcagccttctatacttcctatacaaattttgcggattgg

SEQ ID NO: 14439 - DNA, 1592 bp, Aquilegia coerulea
  Intron number 7 from transcript AcoGoldSmith_v1.024603m (l ocus AcoGoldSmith_v1.024603m.g) derived from phytozome v7. 0 (chr-ID scaffold_45; pos 1711436 to 1713027 reverse stra nd)
gtgacgccagagactgtgagtttatgtacacagtttaattattaattctgagtatgtcatgcattctgcttcaaatttgtgtaaggcatcctgttacatattgggctgtgtttggttcgatgcactggctcacaaacagcaaaaggatgcaattgcaacacgttgcattgcattttgtttcataaacaattatttgcatctgtttagtcaactttttttacacatgaacaatttattgatgacgtcataacctcctctataactcaaccaattgatttcttcttcattttctttcatgttttctctcatgagctgtataaataaattttaatttccataatacatctataaaagccctagcttttgtttgatctcaaaatattaacatggaaattagggagatgtcttcttgtgtttaatttgtcaaatttgttaggctcctatttagatgtgaataaaaataattctttttactgattttgacaatccaagctcacatgctatttagctttccacaagctaattgcccagcgaacacgaattagaatattggtaatctactttgtatttgaaaataagctagatagtgtttaagaatggagaagatgatgttgagacgacttccagatgtagagacaagatggtttggtttggagatggtttgtgggtaggtaacgagatttagcgaataattctgctcaaatttggtgagcaactaattgactaatgggcgacatatccgtggctagttatgggaattactttactggcaattgcaatcaattgcaataagtgttcccaatcacgtttcttgggcagttacgggaaaatatatgtaaatgcatcccaatgctgcgaaccaagcacagccataaatctctacataatccaatcttattattaacttagttgtacagtttcaaataaaaacgattgtttggggcatttgcaacatctttctgtagtattgcctctttgcttgttgttctctaacatcccataaaattttgcttcaatttatggattcttatgtggtgaagaatggtagattggtagaatactctggaattgcatactagtgtgctgtaactagttgtctgcatcatttcattatgctaaaaattctacctttattattttaaatgcatttaaaaaataactagagggttcacgtcatgcattgagtgaacatagattatagattggtagatgaaatcatggcaaggtgagatttttccaatgttcaccatgttgggagctcataggatcacccattgttcattggtaggattttagtgtcattggagtcacaactctccataatcccactgaaataagtacaattcactagatcgattttcttactaccctatattgttctcatgatattgttgctgtcaggtatttcatgagcaatttagctcattaccaacatttttttttttttactttgctgtcgtctttggatggacttctttcatcttttcaatactttgcattaagttttacttccaggtctctattgtcatgttatggttgcagtatgatgagactatactaattttctgtttcaggtgtgtgcttacgagagc

SEQ ID NO: 14440 - DNA, 1631 bp, Aquilegia coerulea
  Intron number 1 from transcript AcoGoldSmith_v1.000963m (l ocus AcoGoldSmith_v1.000963m.g) derived from phytozome v7. 0 (chr-ID scaffold_13; pos 1177676 to 1179306)
aatttccttattatctcaggtaaggaagaaatttgttggttaatggttaatgtttgttacactcttatcctgcgcatctctgtttcgtttttatttattgttttgtttttaatattatcttcttcatagattgattattttgacaaaccgagactttgatattttgggtttcagtataataattgaggcttatgtggtccattccttgttataatatttttagttggggttagaataacgatctggctttgtttccaagagacgtggatagattttatgtatataatttggtcatgggtgtgctccttcctttccttgatttgcttgcgattagtgtagggttcatgtgccacctgttttgggcttagtggggttatatgttatataatctgtttactttttctcttataggtctcagtagtttattctctgggatgatttaattatttaccattgttcaaacgtaaaatgatatagttgtttggataggaagaggactgaattcttgtggaaatggatttgacatggagatcagactatgaataaatcaaattaatctgtgtcagatatggtctgagacgtagatcttgtgaccaagattaggttactgcagttcatgagatcaggatagtctggactggtagtgactgtcgtttggttacttgttatggagggtggttatgcacctaactgagaactttattggtagatcagattctgtagcaaatagggagaatatgaactgttaggggtcgatttcgagtgtggcctgtaaagtggctttattgtagactgcatacattcacaagttgatctgaagttctgatgaaggaacacctttggctggacaaggattttagagatcagactttctttgtaaatgaagtagtgggcattttgctgaatgtgaattctattatgtctcaggtctgtacctaggttcttcaaagttcaaactgttaaagatatgtttttcactgtccattgagcatactgtacgtctaggttaatttagtaacatttgataatctatatcttctaaccttgtgcaagttacttatttattctgtgagtaatctttaatatatcagaatggggagactatattttcccacctgaattatgacaataagatggtcatctctgtttgttggtagttgtatctcagcattacagcatgcttgttgtagtttatatggaagatggtgctgttcacagaaaacctataggaactaaattttttatttgatgttatggtagcacattgagtcgaaattcatatatccaatggaaatcatacaatcagtatattttccgacctgttttctttcttagcccccatcgttgttcatttgctggctgttggccccacataggaacaagacaataatgattttagaaaataacatacgaggatattaatatacaaagaaacataaactaaccctaaccctaaccctcttttcaacatatgatataggggttagggcgactgatcttattggttatgaattactgtacatattcttgattgaagtatgttttatttcaaactatttgatttctctcttctttcttttatgatgttgatgacagtgagcaaacacgagtgctattgacgagcgctgcct

SEQ ID NO: 14441 - DNA, 1801 bp, Aquilegia coerulea
  Intron number 13 from transcript AcoGoldSmith_v1.021981m ( locus AcoGoldSmith_v1.021981m.g) derived from phytozome v7 .0 (chr-ID scaffold_33; pos 2807821 to 2809621 reverse str and)
tgcaagtggcgactggacagcttttttgaaggtaggcatgcaactttctgcttatccctttaatgtaaactctgtttttagtttttttgttcgagagcttatccactgttttataatttatacaacaactcacaggtgcacatagaaaaggatttagttaatattagatgacttctccaacctttgtatgccgcatgataagtaacttatggtagttaagatcattgtggaaccctagtggcataactcatgcgcctatgatggtctaagggcataaatgtaatatccgaaacattaaatctgtatataaaggggtactctctgatttgagtgtctagaactctcacatccctactgtaaaccaacgactaacaagaacacagacatgctagatgatttcagacacagttaacttaaagatgcccaaaatgcatacatatggtaggatctactagctacttttacacttagatggaaatctagttatattctgattaatgttaaatttttaaggtgctaataattggtttgaaggagatatccgttgaaagagatggatgcaaatggcaaaagaggaaaagaaaagtttcgtagttcaaatgttgataagtgcttcactttcttccatgaatagcagtcaatttgtagggactgaaaacaaaaatagatatctttgggcatgctactaactatgcaattaatggcattgacaatgtcacaatgagcagtaactttagatgtgtattttggagcttaattatttcgaagacctgtaacattcaaagaatgattcatcccagcccttggataaggatgaagaattttaatacggccagcagagcttggtctaccataagcttggatatttactcgattgtaatttcgaccaagacctccagaataaactcaattgtttactaagtgatcattagatttatggaatctgttgattgagacatgtcttcaggatgtctatttttaaggatttgatggagagattagtagcaatccattaggagatcctgacattgatgttcattaatatatcagaaacttgaaaggctggacttgaatgatcgaaaaatggataagaagggaagaggactatttcatatcttgacactcctggagagcttttctatatttgacgagttaatttttgggtttggattataagttttaccgacactttactatccacattcatgggaatcatgtcatctaataatctttcttttcgactattttctctctgtctttctacctgaagtatgttttctttgttcttcttgcactttgatttgcttattcagttatttgtatagttgcttaaatgccagcaaatgtaaagttcatcgataataacaaatgtaggttagccaaacaagaaaagcaatacaccccaactactagtccttatgaaattggtaattaaattattttcacatctagcaaggaatctctattagaaggaatctaagttacatgtagtagaacatccagctagaggaaatcctattcttggtagattaacataccttccaatcaaacaatctctttgggactacttgctcaagcctagccataagaggctgcgaaattgacagcatcctagtccttcagatttttgtaaataccaagactccaggaattatccagttatatctaagcatgctctgttcaataacctattttggtcagatatatagagtaatgtttcctcttttaattttttcttttctttttaggcaataacctggtttgatttttaattcttttcagcagtataaagtcactgctt

SEQ ID NO: 14442 - DNA, 3050 bp, Aquilegia coerulea
  Intron number 2 from transcript AcoGoldSmith_v1.013342m (l ocus AcoGoldSmith_v1.013342m.g) derived from phytozome v7. 0 (chr-ID scaffold_31; pos 570432 to 573481 reverse strand )
attcgctctgcaattgtgtttgtttccaaagtcaggtatggatattgtgttttgaatttgtagtttgatggacattatattgttttcttttgttatattgtgagtttgtgactctgtctactaattatatttacacttttctacattgagtttctgttcctttgttttattgttgaaacacatgctaatgcaaaaaggagatggtattgcagttaggataaaaagttttatctattgtttgggttatattttctatggaggcacattttcatctggtctttgagtggattattatttttacttgtagccatcctaaatttccttgtcaatagattctctcttgcaccttgggtcaacatacaaatgctatgattattacaagtaggtagacttggttaaaatggaactgaattgactggatggcttaaatgacgtcaaaataaaaatggccaggctagagatataggagtggcagttgaggacattctgcctaaattaaaaacaggaaacaactgggttgtgaggctagtctgaataatgcattagaggttagataagaaaatggggtttagaaagcacaggttgaggccacaaaccactaagcgtctgtgggtgtagtaggaagcccaaagagtgggtacccccctagacctcggaaagcaggttaatttcaacttcaatcacatgcactttatcagtcaaggtctttgaaagagttatttgggaatatcttctctaaactttaacttactagttcttcaaatgctgaagaatacaatatagagaagattacagttttgaccttagagaacaataaaataatcaatattgtagatgacaaacaatctagtttgaagaaaacaccaagttgaaaataaaagacgatctccaaaaaccttctaaactagtttcgaactcccgtggatcatgaattttgatagagaagggtttatttacgttggtaaacttaaacatcctcagaatttccaaaggctgtcatccaaaagggttgaattgaatgtcgaaaaattcatagtaaaaattacttgttttttgtactatacgccaccctcgtcaaggacgaggcaattcatacgccacctggttgtgacagattattgtaaaatgcatgctctcaatacgcgggcctgcatattgagcagttaaaaatcggttttgagagctaatcatcttaagggctattaatgattaaccgacaaggcggaatataatcgggggtttagtcggatactgcaaaacattatttttatgtatatatttacatctatccttcatttttaatattatctcttgtataatactgcaaactgaggtcttctcttatacatcttaagtggattctaagattaatatcccagtttaacctatgttctctcttttcgatctttttgtttcttctttctttgatagaatgtttcaaaattattgatagaagacatctactctacaaatttggccaatttaagcttaattatgacagagagagctacagccatttacccctagttatgtttgtcaagaaaaaaatagaaaggtaaggaaggagaagtgttttttcccagtaccttgccaccgattaatcagtacttggacacaatgggtaatttatcgaactatttgggtgactacaccaaataaataatcactggcgagttaaaatctgctgattgccattatactagtcggacaacctccaagtagtgattaatcggggaataatcggtgatttaatttgattttaactgcccacccgcgtcaaccccaaagtgtggtttaatgacattcgttatccaggatatagtacttttggagccaatcctttagacatacgttcgtcccaaaccgagttattgtacaagagttatagccatttttctattttttattattgatctttctattaagtacaattctcgtaatgatacttaattcaaagaggttttcaaaatttggttcctgaaatacatatgcaatatactgtgcttgttaaggaataactcttagcaaagaattttgtaaattttgttttatatacaatttacagaaattattattaacgtgcttggttgttaggaagaaaaaaatcttgaattcagagatgagaggagagagaaagagagaatacaaggctaaaacagttaatatgtgagatttccatctgtttccgtcagttctgaactcgtacaaattgctgagctttggattagattttccaatggggaccactatcttatgtcgaaccaagcacctggaattcagcaagtgtttccgtcaaggcattttgccgagccatagtttcagtttcattagacttaagagaaaccgattaggaagagagatcaattccaacgtggaacctctacctccttaaagttcctttgtaaatatataaaggtgcatgtatgcccttaaaaacttgatcccaagattattcatatgggtatgttggcagccagaacactctggtttactttctttgtttccactagaaagcctttttacttcatcatcatatcttttctacaacttgggaattttcagttggattcattaagcttctcctcaacttgaattatgttcaatgcttgtgctcaagaatccaacagaaacaccgatgtgatagctggctgagttcctacaacatcgtttttaaaatttaatgcagaaaggggaaattggtcgtgattttttttcttatttaataatgaattatagatgtgccaatggctataagacataagacaggtaacagggcttacacaaaggtggcaatataacttttccatcatgcatttttaaatgtttccaaatgtccccttcatatttttgtaagctaaatatatgcttgttgaaaaaaaaaatgttctttctagtatctggaatgagtaagttttggcagttggctacaatgtttattatatgtatgtaaggaataggaactggttagatgtcaatttttgttataagtatgctcaacctcaaatttggatccaggaattgtcattttctgggtttgttattggaagagc

SEQ ID NO: 14443 - DNA, 1495 bp, Aquilegia coerulea
  Intron number 1 from transcript AcoGoldSmith_v1.002133m (l ocus AcoGoldSmith_v1.002133m.g) derived from phytozome v7. 0 (chr-ID scaffold_9; pos 6265234 to 6266728 reverse stran d)
tatcgccatttcacaacttccagatctctctcacggtacttctctcacctactcttatattatattgattccttcttcatattctattgactttcatctatgttctttttctcatcaaacttttggtgatttattcatgttaatgaattcaagacaaacaatttgattaaagtaggtgaattgggtaaaattaatctatctgatatgaatgttatatcatgtttcttcccacatatgaacaacacattttatcaaattgtttcattagtaggtctctagtaatagagcaggatcattttttttttattattattgaagtaggaattcaacagtttgaggagtagcgcgattagctaacttcatgtttgatgtgtaatttgggtgaaagttggcaattagaatgacttgttttgttctaaatgtgtttttgatgacgaagaacaataccttgggtttttatacatcttccacatgttttagacttctgtggttacttgtttaagcaattttttaatagcaaaatattgcaatagcttccatagttaaatcaccaagattgatcattagagcaatcccaatgggagggcagtttggtgccctccacgtaggtgccacatgagcaaaaccaccttccaaatcactctctatccatggtagtcaaaaccccctgcgaagtggtgccaatggaaaaatttggaaatgtcagtttaggaaaattaaatggcttataagacggaactttgagttccggtaattttactaaatataagacagaactttgtattccgttgtttttttataagtgtataagacggaacttcaagttccatattagataaagtgtataagacggaactgtgagttccgaaaatgttgaaccggaacactgtgttccgtcttatacaagtaacatggcattttggatggcactctattcccctctcaaatgccattagaacttctaaccacctttgaatatttgacccaccgttccattggggaaggaattttggctgagagggcatttcatactaccgcccttctcaaatgccctcccatggggtttgctcttagagacattgttttgttttgaacctaacaaaagttagatagcgaattagaagggaaaaagaagtgttttgagggctttgattttatattggtagacggtcccaccatataatttgatgcacatagcacatcccctaaaatcttaactgccactgacaactacaaaagcttgattgaattttccactttatgctacgaatttggaatatgaacccccttaaagctctatatttatacagtttaatttgttctgtaatcttttttcttttttcttatttatgaaagcacaatatatactatcgctaagttgtttctgcaattattttctttataccatacccaggtatttattgagttctcttattggtttgctcccttttcttcataaatatataatcctaagcctcttactgcagcttggtca

SEQ ID NO: 14444 - DNA, 1428 bp, Aquilegia coerulea
  Intron number 2 from transcript AcoGoldSmith_v1.018945m (l ocus AcoGoldSmith_v1.018945m.g) derived from phytozome v7. 0 (chr-ID scaffold_37; pos 2026963 to 2028390 reverse stra nd)
ctggtgagcattcaaaatttattttacttcacactattactccgtgttcaatcacaactagttttaaacataatctgactgtctcatcttttgcatctgaattaattgttttccgctttgaagtacatgttaggtccttctttagttttgggataatctgtctatctgaccaaatttgacaatatctttatccgagatccttgatagaaggttgaattataattacaattcatggaccgtagtttgcatacaaatttatgttccattgattctcttgtatatctgatatattctcagtgcaagtttgtagatttccactgatttcataattgtgagttgtggtgattctatacctctctttgctgattcgtatatgattctgtatatttcattattgataattgtgacgatcatacatctctccgttccttctttcattgatcattgccagttttagacatgcatattttagacgctcatgatgataggatacatgtagccgtactgtagtattttaattgctcccttgtgtcattcttgatttaccaacaacttttttctatttgttccttcgttttgatacatttgagtctgatatgtgtgctagacataagccttaccgtttaagagaatacttcagaaatcagcagaaatggtataaacacgtgaattagttgcaatggtttagtttgacattgatgatcaatctggattcattactttattagaatctggaatatgtcacctatagacgtgtcttttgattctaaggaaaacatgtgtgcgcttctagaagctaaccatatgattgttttagtgtttactgacgtccacaaactgcaacatccaattgagtcttgtgagatcagatagactgttgctaataagttaactgcttgatgacttacttggcgttgcgctacgagattgctataagattaggctgaatttttgttccgcagatatgcttgtctatgtatcttttttctaccaaatctagattagcttttcttcctatctggatctgtgttgcatcctcctacagtccgtgcttttatttatccaatacttccactctatatatgacaaggtgttcattcctttcttgcatcattctaagcttcgtttgtatttttttttttttttcttctcatttatctaatctcttcaaagaaacatatgcagagacccaaaaggccaaaacacactgaaacgaccaaatatgtttcttgaatcttaactcacgattctctccaagtaacattgcttgtataagtttatactttatacgtgaaaagctgaaatttcaaagtggtccaactggaatatttatggtctagactttgctcaactatgatgaagtttatttgtgcttttcttatatagattctattctttatgaatatgttccaggtgagaaggatcact

SEQ ID NO: 14445 - DNA, 914 bp, Aquilegia coerulea
  Intron number 3 from transcript AcoGoldSmith_v1.001282m (l ocus AcoGoldSmith_v1.001282m.g) derived from phytozome v7. 0 (chr-ID scaffold_34; pos 2744455 to 2745368)
aaataaagtgtcttcagcagcatctggttgaaaaggtgaaattcgaaacaacaccctcctttccttttactattattattatgaggtatatttatcttttggtccctcttaaaaaagcctagttagtgaacggttcagaatttaacgattattttttagcatttggtccctcttttacctcaagatgtgcatcctttgccgttgggtcctgttatttaattacatccacctatcttctgaaagtagtcaaaatacaaactagagagataagaaaaccaaatgctaataagtgattaagtctgaacgataccctgaataggccttcattagggcttattagtatcattatggggaacaattgtagcttcaacttgtgcagaagtagttctaagaattagagatcagttacaacttataactggagcaatttcctttgatgtataagcagtatagtttcatataaaaagggcaatatgctttcatgctcaaatttattacatgtgtttgagtagtagccatgagcccacgagtagatgattcagcctctgcgcctacttttcacagtgtgccattagtctacgagtctaatagtgttgctattgctcggtcctctctctcatgatttccatggtaggctgtaggggtatcgtctgcaccagtataatgctcccaaatcctattgtatgtgtagtcagaaattttcagaatgtcgtttgtagttttacacgcacattcagttgattattgttgttgagattaccaagttttaaatcaagaagcttatgtttcatatactagtttaactttagtattttagtatcttagtctgatccatcctagtatgcatgacagtggtccattgcttaatcattctttcaggaagaagaagttgttacactgcaaaagaagctgga

SEQ ID NO: 14446 - DNA, 1534 bp, Aquilegia coerulea
  Intron number 6 from transcript AcoGoldSmith_v1.006164m (l ocus AcoGoldSmith_v1.006164m.g) derived from phytozome v7. 0 (chr-ID scaffold_1; pos 10374867 to 10376400)
ctttgattgagtctttgttcttcccagctcttcaggtatcctcacaattggtgttttattttggcctatattcaatgccaaacactaaccaatcgttttccttagataatatggtttcttcatacttttatatatttcaaacttgttgaatttcatttttgcttgttaagtttgattctgtctacatatgattttttatttttttatttttggttggcaagtgggattgaggggacccctacccctttaaattacgtgtggaaacttatatcaacaatcagctcttgacgtgtttcgagcccacgacctcttcactttgtgcgagggatgcaaccgttaaacgatctattcaacccccaaaagcaaaactatagtgtggagtatgttaataatatatactggcgaattattatgccaagaagaagaaaattgaaaggaagaaaataacaaaccaaaaagttttgctcatatatttaccaaatgaaaagaaactctgctcatgtatagagaagaaccagttctggactatgaatacatatctgataccagttaaaagttaaaacaaggcttactttgtttctctatttaatgaccattacaagtactctaaagaaaagggactaggtggtattgcttgaagactcagaagacttaaaggtcttcagttaagattttcatgaaagggtaaggtaaattataggggtggctgaataatagagtaagacgtctgtggatggtgggatactaaaaaatgtgaatgggcgggataatgttgtgatttccaagctagtagcctcttggagagtttttgtttagttttcttcttttaaacatatcttaaagggcgtgggtagttttttcttaaaaaaaaaaacccaactgcatttctcgccgagatgggaagctcagtttattgttgaatcggccgatctcaactattttattggatccgattagtctcagaataaggcgtgttgtatccctcctacggtaagaatcgatttctttccaaaatctcactgaagtatcactgattaaatagcacagggcttaatagaataagaaccttttcttctatttattttaaataaggttctttggcaccttcatcttggatgtcctttttcattctgagatattttacatccaattaagatttgtaggtggaacttgattttaagacgctgtgttccaattcttgtaaacaattttcactttaatttttatttttgcttgtcaatcccttccttaaatgcgtcaattaggcattgcctgtactttaagatgcttgattttgccaataaataaggttaaggagttagtttacagataaaaataaattgttgcgtcaatattggtgggctagtacactgggcatattaggcctctcgagatttatattttttattagaagtctttcttcatttactttattctagatctttttatttaaaatgagactgttttggctgtaacttatacgatgtttcctttttggggtttgtttgcatctctgcagggggagtcggggaaa

SEQ ID NO: 14447 - DNA, 785 bp, Aquilegia coerulea
  Intron number 1 from transcript AcoGoldSmith_v1.007151m (l ocus AcoGoldSmith_v1.007159m.g) derived from phytozome v7. 0 (chr-ID scaffold_22; pos 2148026 to 2148810 reverse stra nd)
aaaacttctaacactttcatcttgttttacaagaggtgagcttgggttttttttttttacatttggttttgaatttgtttacgtttctttcattctgttttgattacgtgggtctttgttttgttgtggtttgaactaaaatttggagtttttaaggtaaaaaagcatatgggcagaagtgttttggatctctagtgcattatagataaggaaagactcattttttggtgttttctgtttgaaaaaatggatttgggagcattataggtaattaagctaattgaatttagtagtataaaggaatgttttctatattgaattagtgtttcatatgcaggaagatttaaagtatgttgtttgaagattgagttttctgaaagtgttgatatgaaattgagcttttttgtgatttctactctaaattgggttgttatcttaagggaaattcaacttattctcttaaaagaaggaattttaggtagaagggaaactacagtagattgtttgacctgattttccatttcatgtaagtaattttttttaaaaaaatggtggtatgttattctgttattttattgattcaatacgtcttttcttttcgttttccatgtttaattatgtttttttgatctatcgtgtagtgtaagaaagtagtgattgaaatgttcaagtataagtcaattgtcattgttaaaacttaagaggataatattgaaactgaggaatttgttccatacgtatttgtttcaggtggaagttttgtccgggaaagtggtggtacagca

SEQ ID NO: 14448 - DNA, 4116 bp, Aquilegia coerulea
  Intron number 1 from transcript AcoGoldSmith_v1.009873m (l ocus AcoGoldSmith_v1.009873m.g) derived from phytozome v7. 0 (chr-ID scaffold_37; pos 1733842 to 1737957)
ttcaacccaaactctttcaagtagaggaagttctggtatgtcaaactttatttgtttatgtataatgattaacgaacccttttgtttgcctgctgattggtatttcatttcagaaactatatgcattttgtttgtacagaattgaccattgttatatgagtcactccacaagtagatagaaggtaatatatggtagtagtatataatatatatatatatatatataggttcatctgtcgacgcactagctaaagtgatattttggtacttttcattgtaattagaagggggtgatttaggttttggtcaccaaactttagtataaattagggttcacggatggtttttttctttattagggttcagagatcaaccggaaaaataaccaaataatattacaaaatggccgaattacccttacatgtgatttgcacgagttcaccttttcggctttttaggtgacacgttgcgttcatgcgacggcttgatctagatcgaccaaatccgtgcgtccatataatttttcttcagatctcgagcttttacacgcgggaaaacttgcataacaccctaagtaactagaaacttctattttcttctctctctctttgctcctctgctctgcaaaaaaaaaacctaggttttacactctctctctctccactcttctctatttctagtatttttttcatcaaatttcaacaatgatgtgagtgaaagaaaattccgtggtgatttcaaagcaagacaaaggcttaattgtgtgaacaagggttttgttggttgaagaagggtgcatatcttcgatccactaaggtatgtaaaagtttatccttttgaactccaaatctatgtctcatcatggtatttgcttgcattccatccattgtttgatgttgctgtcatttttttttttttttatttgatgtattttctaataaaccctttttggtggtcaaaaattacaaatttgtttggggtttcttcttaattttactttgttgatacgatatgttagaaagatcatgtatttttctaaaatttgttatttttcaactattacaaatcaaagctttgatttttttttttttgaaaagcttgggtttttttgtataaatagttgaaaactctgtgtttatgtttagtgtttgattatctgttaaaaagatcgtctttttctaaaatttgttattttcaactattaaaaattaaagctttgatttttttttttttgaaaaaattagggctttttgtttaaatagatgaaaactctgtttttatgtttaatatttgattatcagttagaaagattgtgtctttttgagaaacttattttgttttcaatacaacctgttagttgtatgtttagggcttgattatataataaaaaaaaaaaattgttagtattatataaaaaaaaatctgttagtatgatgtcgagtttctcacaatcaagtaaacaacttaatatgatgtgaggattatttgttgatttattttgaccttaatctgatgtaagggttattgttcattttactactgctattgctagttatacaaatataattaatactagtgttccatcttctagcttcttcagtcaacaacaacaactactcaatcacataaatggttttagttacaatttttaattgcttatatacacattgtcattttattctctattaatgaacatcaattgttgctcattgttgtttgatttcagttgaataacatcaattttctttttgcaaagtataacatcaattttctatacttatactacaataggttttgcttgtagtgtaatttgtgatgttgttttgtttgcagtgtaatggctgatgatattaaaagtattgttatgcactatggtggaatgtgggggcttgttatacctggtaatgtaaagttgactaattacaaaggtgggaagaaggttgtgtggaaagttgatggtgagaaattgatgtggattgattttagctatgatattaaggagttgattgagaatccatctatagctgataaggagttgtatgttgcttatattttggatggtgagagatatcaagtgtctgcagatgttcatctattgaagatgtggtcctcaatgaagaagttgtctgataaaaaatatcatatatttgtgtctactattgttccagcagtggcaagaggcacacttggtctagttagaaggtcacctaggattgctaagtcttctaaacctaaagttggtcagcctaagtcaaagagagtgatatttgatattgatgatgatgattctggcactctattgccacctagtccccctaagtccaaccctgtcattaatgataaccttgattgtttaagtccagtaccaagtgtacccaagtccaacatgaaccaagcacctagaaggtcacctaggtttctaagtcccaattcacaacctgttgagtctggtagtgttccaccccttccccctattgcagtcaatagtatgagttcatgggagggtagtagtccattacccgagagtcagtttatttctcaatatccatctcaatttccttctcagtcccagaataattccatagatagattgaaacaactaccaacttcaagtgtcccacaatgtgagtctgaaactagtaatgcaagtgttcatgttactggtgattttgagatgtatgtggacctaggagaaatcagacataatgcaaggatggagttgttagatgaagatgaagaactaactgagaggccagaatattatgcagggcctttgtatggcattactgttgatgatgaggatggagatgactatgtgtctacagatggggaatatgagccaagagagagtgacttagatgatgattctgacagtgaattaggtgatgaggagaatgaagtattgaaagaaatacaaaatgataaaaaaatccagcatgaaaatgtctttgaagatgaagacaatgagaagcttggcaatattgcagagaataaaggaattccagatatgagtgcaagtatgtcttgggccactatgaaagactgcgggatttacttcaagaccttggttgttacaaagcattatgaatatagcccagaagcaaatgacactttgaggtacagagtcaagtgtaaagataaagcttgtggatggtttgctaattgcagaaaaaatggtggtaatgactgcacaattgtgttgaagactttcaatgatgaacacagttgtcgcggtcttggggagagtaaaaataaacaatgatgagaggaggtataccttggaggaggtaagtattacagacacttgtgagtatttttgggattttggggactgcaatagtttgagactattgatattttggagcctgacaatccaatgtagtcatggttgtcgtggattttacaatgtggtatttggactttatgtaacctaagtatattacttgatattatgttatgtattggatatttaaacttgatattatgttatgtatgttttgctgtaatggatatgttatggttggttttatattgtccagtgtttttaagcttagtgttgatgttgcagtttgcacaccctgagatatattgcacacactgcagttttatttcataaatagatggaacacatgaaaatacatggaaacagagtacacttggacacttgttgcaagtacaaagctttttgttaagaaactgttagctttttgttgcagatatgatgagatgaaaaaaacttgggtttatatacaggtttatgcagtggagaagatgaccaacggctagtataacggatctatttttttggccgttggattatcatgctttgtctagattataacacctgtccttgtgtttgaaatgtgcacgtgcaggtcacgtgaagttttaagtcatgaatttcaagttatgttttgagttaccacgtgcaagtcacgtgagttttcaggggtatatttaggtattttgaaaatattttggtttttttaaggttttcttggaaaaccatctctgaaccctaataaagaaaaaaaccatccgtgaaccctaatttatactaaagtttggtgaccaaaacctaaatcacccattagaaggtgacttttgtgtacagaa

SEQ ID NO: 14449 - DNA, 1037 bp, Aquilegia coerulea
  Intron number 1 from transcript AcoGoldSmith_v1.024007m (l ocus AcoGoldSmith_v1.024007m.g) derived from phytozome v7. 0 (chr-ID scaffold_20; pos 1296507 to 1297543)
gatcaaacccgaaataaaaaaaagtccattttgatttggcccaataataagttctttatagcccaacccaataataaaacgttttgttttgtttcgttttctttttctccaaaaccctaaaacattcaattccctccaaatttgttgtgatttcatgtcacttcgatttcttcaactcaactcagcatcgattgaataccagatctaaagttttcatcaagaaattctactcaaaacacaatggcaattctaaatcaaaatggtattcttttaactttaaaaccctatcttctttcttttcgtttacaatttgatttcaatactaactgttaaaaaaattgattgatgaaggtgttgctcatcaagaaggtttatattcaaatttgttaattggacctaaaaaggtattattctcatttgattacatttttcctcattttgtttgatttaaatcttaactgaattagcttatctttaaatacttctgtttagaatttgattggtagtaattaatgattttaaaatgcaatttgttcttattttaaaggttttggtagtagtgccatgatgaactaacattactactaaaaagcggtcaaataaacttattagcgaaaattgtaaaagttaggtaagagaaatttttcattttaaacaaataattgcatacgaagatattgcttttacttgcagactacaaaataaagtctgatgatactgtttatagatactggaactaaccaaaatagtttaatataaacatacactctataggcaccttgttgtggacttgtggtatatcaaagttggaaaatacgtacatcctagtcgttgaacatgaaatttcatgtgttgctaagacttaaatatgtcagaatctagttcttttggactcttcattgtagtctcaaaggggtatgggaagaaattaaccattctttgagattttagcttggttattaaagaggtttataaataaacatcaccatcttctccctctagtcttactagtcgtggttttatattacaggaagctt

SEQ ID NO: 14450 - DNA, 554 bp, Aquilegia coerulea
  Intron number 5 from transcript AcoGoldSmith_v1.006877m (l ocus AcoGoldSmith_v1.006877m.g) derived from phytozome v7. 0 (chr-ID scaffold_35; pos 1554365 to 1554918 reverse stra nd)
ttggaggaacattctcaaagaaaaagaaatgtaaggtttctaatagttaaaatgaatacactacttcaatagtttatcaccatgttctgaattgaaaatgtcaagattttgatagctagactcttgcctgcatgttgccattaggattaatccaaatcaatatgcttaatatactcgggaaaaaaaagcctgggcaataagcttacaagaccaagaattagtctcaagtgctccaaaagaccaaatatctatataacagtataacctggatggaatcctgttcgactatcgagtaacttgggaaagcattaagttaaatatgtttaggcttgacgctgaatttggatttgcttgcgttgagttattaaatgtataattaggcacctactaaaattacagcaatcccctagttgtagcctaaatgaaatagatatatagatgaaattctacggcagcttctctgcttgtgatttggtatcactattatgtttttttttaacataagttgtgttctaccaggtgttgtttacagtttctgtgacgggattttcaca

SEQ ID NO: 14451 - DNA, 940 bp, Aquilegia coerulea; identical to SEQ ID NO: 14090
  Intron number 2 from transcript AcoGoldSmith_v1.011151m (l ocus AcoGoldSmith_v1.009394m.g) derived from phytozome v7. 0 (chr-ID scaffold_9; pos 1583561 to 1584500 reverse stran d)

SEQ ID NO: 14452 - DNA, 2368 bp, Aquilegia coerulea
  Intron number 2 from transcript AcoGoldSmith_v1.011703m (l ocus AcoGoldSmith_v1.011703m.g) derived from phytozome v7. 0 (chr-ID scaffold_27; pos 2670918 to 2673285 reverse stra nd)
agcgtaactattattggacctcctgatactctttagtgagttttttttattcttctttccttttattcatttagtttcaagtttaatcttttatttcatgttctgaatttggcaatttctcggtgcgattattgatttgtttttttgagtaatttggtgattcttggtgcgatttttagtaatttggtgattctcttaaagacgattgcttgaattataatgattagatattgaggaatgattttttatcttagaattatgatttgattttatgaattaggatttctaaaaaagttatttgcattaagtattcatagatgtttaagatttacaattaatcgggatgttatcctggcattatatgatgaatactgggattcgaatccaaagttattagatcaatagctgtgttgtgcatttgagacgtatcaagatccagtctttgattttatgcttttaatttaaatttcaggcttcgtttatatattttagctgagggtcattgctcaaatatgtctcagccatggaattaggatttgagaattctcattgttttggtgagaacttgaattcctaaaattagtgacttgtgatttctaaaacacagaatcgacaaatgagtgattattgcagttgtgtcaaatttagatggcgtactggttgccatttatttagtagactcttgttggggatctctaaaatctgagggtgatatgcaaaatggagtaatggatatccagcttatgagcatgtggacagaccattccttaaccagttgctctgtaggaaggtttttggggataggtggagaatccaccttttcatcatcggaactgctctctgtacagctgtttcaagaggcccaaggcaatgatattccagtttcactcttatgttcttatagtagactagtagaggacttctgacctaagcttctgagattagtgaagggaaatatagggacaacagtatggtggcatacactcaaactctatagttgaggatggtaaatcctttttgaagccacaataaaaatgtatcaaatcaaaactgttgttatatgggttgaagctacagaggcttacatgtgaattttgtagctgtactgcttttggaatgtgacattgttcacttggtttaaatcttggctcctattgtgaagttagtgtatttggatgtctgtagagatgttagcaatatatgtggaaaattaacttaattaagttcttgtgaagtagggcacctacactcgtaaactgtgccatgtctagctcctcatctattgcattccagcaaactagtaaagtgtattgcattccagtaaagtgtgccatgactagctcttcatctattgcatttgacttttctcaaatcgcaatgagtgggcatttgtcttgagttgctaaaaatgtaaatttcaagcatgccattcaacaaagagttctaaagtagtaggatattagatattttgattttgaggtctgccttctaatgcagaatttggggtatttttcttaaagcttgttacaagatgggtgcattgagcaaccatgcctcaaaagaggtttgtgtttttccttgggatctttggattcattgtcatttctatgagtgatacttgcaagcttgattgggtttcttggaccatattagcagaattagggttagtaattgataatctaaatgcctgtcccaagagtttggattaagaggattccatattagcaaaaattaactatttcgtggactaggatctcatgttgggcaatcttcataacttggaaaaaattatggactatatatatatttactttggggaagtgaatttgcagcacctttttagggatttacaattttgatcctatatgagaatccttcttgggatagttttgcaagctgatgcattgctaacacaacattaggacagaagatactctctccaacaggcaagctctttcgaaaggtattatttaaggcaatatgctgaagctaagtgtggcacgtaatgttgaagtgttcatttgagattccatttctctgggttttaaaaataacgtttcgcgttgagtgcctcagttgtcattgttgactccttgaaaatatagttggatacactataatatatttcttgttttaccaagagaaaaaaggatgccaaataacatgacatctgcatgtattttgtagtcgttttaatgttacgagtgttttggctttcgaggatatttatgttgattttgtctcaaactaccattcaatgttttatgatcaagcagaacagcaaaaaatttagaaatttaatgtggtgttcatgaaatattattattttttccagtttcctttattgtctatttatgtgactgcagtg

SEQ ID NO: 14453 - DNA, 1470 bp, Aquilegia coerulea
  Intron number 1 from transcript AcoGoldSmith_v1.011877m (l ocus AcoGoldSmith_v1.011479m.g) derived from phytozome v7. 0 (chr-ID scaffold_9; pos 3880831 to 3882300 reverse stran d)
tccactgcaacttctgcaacacaattttagcggtatattgatggtatttagtatatatgttattatctttcttacacttttagaactttgattcatggtcttaaaaggccatatccactgtccagatcttgcaattcgatctccatataatcaggcttttgtttatattgaaatttgtaaagaagaatgatacagtgtagtatacagtactagttagaatttatatgaaaaaagttcagacatgcaattgccaaagaatttcatctcatgcctttataagtctagctttgatacaaatttatgagaaaattggcaaagtatcatttggagatggtgttgaagataagttggtaagtggaaataactactagattttctgatctagctagggttttgaattttgatattcatttttgacatatttggtaaacataaaatatcaaatcaagtacctagattttgagataaaagtatcagacactggtcttgtcaactcttactgatccctgaaagctatcaaatgaagctttatgaaacctcacatctaattacccatattacccttctggccttaggttatggtttttctctcaaagcttatgttctaccaattaaaggaatttgacttggttcaagtagctagctagggttatgttaagatctagctctttatacacctgggaacaagtttaagcttttcaacaatcttcactagctagtaactagctagtctcatcaactatccagttcatctgtattaaaaagtctatttgatgttattgtatatgctatctatcttttttagtattattctttgaaaattttgcagtagtactgtgtgtttattattcctactaacattcttgcacagtcttatttctttgataaaaaattcagacagaaactgcaaagcatgaagatttctagtcaccacactcaccaccacataatgtttatctttccttttggtctatggttcctttcatcatgtcaatatactttctttacctctctctcttctctttctatatctctgaagagaatctcaatagcagatctacaccttgatcatctctctatctctctctctctctctctttaatcatgttcaccttattcatcaatagaagtggttatgaactttgtgggttttgttgcagtcaagtcgttttcttctctctctctccctcctttcttctctgttactatattacttttctttgtagtatttgtttttggtctgttcagaaaagtcaggcgcaccaaaagcaataagaaatagctgaacatttggtcatcgatctatcattagtttaggagagagagagagcactttgttcttacatacttatttttgtactggaattttgttcaaagtaaacattcaaagcttactaattgcaacttctctcttttttctttttttttttctttctaattatgtgtttttggattgcaggtcagtgttcc

SEQ ID NO: 14454 - DNA, 1203 bp, Aquilegia coerulea
  Intron number 1 from transcript AcoGoldSmith_v1.001250m (l ocus AcoGoldSmith_v1.001250m.g) derived from phytozome v7. 0 (chr-ID scaffold_4; pos 7529790 to 7530992 reverse stran d)
tcccgattctctagctccgaagaagaagaaggttagtagtgttagctaacttcttagctgtttttctcaccttgtgtttcggtttaacgcaagttcttcttcttgttttaacgaatcaatctatctttatttacattctcttcttttcaaacaaattcaatttcttcaaacattaacaacaacaacaacaacagtacttagttcttcttcttattgatatagatctagatctcattttcactattttcttctcattttactgtaaatttttactggtgagtttgtttgatttgctcaatttgaatatatttctataattaagaactacatttttggaatacttttgaatcagtttgcttcgatctttgagtttgaatttgatttcattcagatctgattcagatctttcggttttgttgatttttctttactgtgttgaattgttcattttcaaactcgtgttttttatttggttttctattgccattgccactataactgttcgaattcagatctggtatagttttgaatggttatgtttctcaattattgtgttaaagcatttttttttcacaagatctagtgttttagtggaatttgtagatcaatgttatggttttaagtaaatctgattataaatcaattcataaagtgtcagttgcagttcacatgtaaaatctgaagagtattaaatatggagattgtgatatttatgttagaatcctgtttaaatcaacctcttttattccatgatttgaggaataattttctaacaaacttcaacagaaaaggcacaattttgaattcaaattagaataaatactgtgacttaggttttattcttcccataggtttttttttatatgtgaagtatttgtcaagaaagaaaaccaaaaagttttttaattatatagaaagcaagtcgatcacacatgtcggttgctttaaggtattctgcggtattctgcttctttcaaaaattaaaatttgtattttacctaaagtacaaaattgtatttttttattgtgaaatgttttacttaatgacaaatatttgtggtcgaaactcgaaagcactgtctgtccagttttaaagctaattttctattatatgcgccaatgaaccttacattcttcttaagttacagtatctggattctttaatcattttttaattatagtattatttggtgaatcagaaaa

SEQ ID NO: 14455 - DNA, 1654 bp, Aquilegia coerulea
  Intron number 2 from transcript AcoGoldSmith_v1.009614m (l ocus AcoGoldSmith_v1.009614m.g) derived from phytozome v7. 0 (chr-ID scaffold_2; pos 4223922 to 4225575)
ttgagcgtgttcggtttgttcttggtatgtgttggttttaacttcttgtttgaaagttttggtttgttaattgtttatacttatatgtgttctgacttctgattaaaattaatttttcttagttgattgtgtttatagtcataatgatgcaaaaacatattgattgattctgcagttctgcttagaatgatactttaactactagttgtgtcaattgaattgcattcttaataagattgatggattgagtggttgacatattaaattaaattgtttatctgattcttttggttttggaattaaatcttgaaagatgcgatctagagctttctgtggtccttttaagaaattgatgtagattcataggaggtcaaaatactatctcgattcattggcatggaggagtcaatgatccaggtaatgtttattgccaaagaaagaaaaggattataagaagaaacaacacagaataattgattgggatttctaatgattttttattagtgaagtgttttgtcgcatgcaagatctaaaaaagaaaacataatatcgacaaaggctaccgcacgcatgagtgcttatctgattaagttaaggtgttttagattgacattcagatccaatgtctaggttatcccaagcccttagaccaattgtgatcatttgagcttgtgattgtgattctttgtaggtctggagattcatttttgtggacttctttccctggacatctctttattaccacgtgtttatttttccctggttcatggattcctctatctatgatatgcaatttaagatcatcggccacatggaatttttatatgtagttgcatgtagatgtgaagttggcaaattctttctattttttcaattcgatttgcatttgacagtcttttatactggcatgcttgatcagtgtgcttgagttatgaattaaatattcaaaacaaagtttggcattgcatgaactgttcaatctgttctctgtactgtagcgtagctagatttgaaacatctaaacaggtcaacaagaggtataggtcagaatgaccactagaagcagccaatcgatttccgttaaaaaaataattttatgttgaccatatattttcaccattacttcgaccctagatttgattgggttactatcagaataaaaatatttttgtggagataatatctacaaatcatcgggaaaacgtggactttgtaagtgtttcaactttttatggtaaatataccttggtcaatcttttaatgatccgtccgatcctagaaatcaagaatgtgtatcttatgacttgtcatggtggctaattattatgcacgtatatctccttaatttatttactttatattgttgtccccctgtttattaatgtgaacgatgggaggccatggcatcttacttggagttgcctctttatagcatcatatcacctacaaagtacaaaacacatgctctagattctctttccaggataaaaacaacataccagttgggtgacatgacatcaaaccaggaatacttcctcaaagacgtgtcaagtgcattatattgtaaacacagattattattagcattgttttgttcccctcacccacaaagctgatataccttccttttttacagatagcttgaaaccggaag

SEQ ID NO: 14456 - DNA, 4555 bp, Aquilegia coerulea
  Intron number 4 from transcript AcoGoldSmith_v1.010148m (l ocus AcoGoldSmith_v1.010148m.g) derived from phytozome v7. 0 (chr-ID scaffold_36; pos 178924 to 183478)
aaggaaacaaaagcgctcttggacgtgtcacactggtactactcatcaactttccatttgtagatatgcttttacttcatttgttcattttagttatatgtttttatgatgtttcgattgaattcgtgtatgtggatatcttgtttactagacaaggtaatgtaaggtttgtttgtatttggggaattttattttcgtttcttcttactttacgaaaagacctgactttatgaaaaaatggattcatattggtagctcttgccttaaaattatattaaggatgatgttagttgtaataaatattcggttatggcctgtgaaccactatttcacctagagtgttcctacttaaagatagtttgaaaattgtgaacagtttcatgtaagcatgtcagatcacaaaattacatggatgtttacatagattacaaatttacactgaagcctgaaatatgttattgcttcagaaagcaaagaattgttacccttttttaagtgttgattgagataccagagcccaagttcagaaaaattctatgcatttgttgagcaaagttcctgaaaaaaaactaggttacaatgagtttaaatttttttttttgtagctcttcttatttctatcctttcaaatcactgagggcggggaattgacttaaagttcgtgctgggtactattaggaaatgaaaagacaattcaacagcattattattatatttaattttttcccaaaaactttaatgccagcacggaatacttcgtttaagaggatttaactgtgtgcattaatgactttctattccactgccaatacaatcaaatgattatagacctgtttttcctgttctccgaaacaatgtgattgagggcaggttcgagatattgttttgagttttctagaatctattatgattgtatgaggagcggtggtgtacattagactatcatgagggtatgtcagagtgggtgatcgttgactcgttgtttttcattctctcttctacagcttatgttaacctctttctccttttgtttcaattactattactctacctttgatggggaaaaaagttatgactgaactatctataatattgatccttcctagatttcatctgtattgctgcagcatgttgattagtgtcaagggtgtatcctcatatgctgcaaacctgtggtccgaagttgacatttcatatttttgaatcaccaaacaggaatttgttgggcaacttggcccttgtttctttagagattactcacttaaagctcaaaaggagtggcatatattatctgatgactgaacataaagcatgtcccttcctaaggccaagtctatctcaactctttcgacccaaagaaatatgtatcacacttcactaagaaaggataaaacttaatcgaagaaaatttaaattgccattttacctgccttatttttaggttaaggtgccccaacctttcattaatttctcaaatgagtatacattttgccaattttagcctcctttacaagattcatcagctcataggaggaatacaatagctacaaggaccctcacatgcttgaccagctatatagtcagctactttgttactctccctaaatacatgaatgaactgaacatcttcaaagacagggatcaagcaatcaatggaggtaatgatattgctacaattccatggtttttacgacgcatatgatagcttaaatactgtgtagtgaatcagatcctatattcaccttgtgtggacctagacttgcacatgtctttagtccttcctctattccctgcatctcttgtaccataacagattttgctttggctcctcctgagtagcacattacaacttctctgattattccaacatattcacatctttcaataccaactgacccatctgaattaattttgtagtacccatgtcaggctccacccatttacatcttatagttctctactttctcttctagttaagtcaagtctttttgcgagccctcttatctcacctgtgtctttggtttccaatagcttagtctgaatgtattatttcatctccctaatcagcttggatgttagtgtgttacttcttcccaagttgacctgagattcttgatattctttctgttgcgttcagcccagatgtgatatattgttgcacatatgtacactttgtggagttcacgagtaacagatttgttgctgtagtgggataggacccagtctcattgttcatttacagaaccttgaataactagacccacctttctttgtattgctttccatatcttcactgtatagttacgttcaaagaacaagtgctttgaattttcccttgagtctcttggcaaaaggaacaagaggatgtttagataattctcctatgtataagcctgtcctatataggtagtgatcctgagaacaactgccaagctgtaaatgagtgccactgccgtggaacagccccttataccccatacaagcttccactatttaacaactgcactaggccttctaacacccaataagcagatctggctgtgcgtttccgctctgagatggtagtcatatgatcctgtcttcctccaaattcctgcttatatccgttttcgtgatatttgtcttaatctctccatcaggttggcgtaaaatagcatcactccagtacccatcacacaatacattattaactttagcttctggtatattatgcaaaggcttgtcagaacaccataaattgaaccagaaactagtgattgctccatcggctaaactgtgcctaatgaatttgcttgctttgcgtctatatttgagtacatttctccacacccaggagcagtcctgtggtatggtcttagtccagaaatgcatctctctaatgtgttgttgttgagtccacattgcatacactccatctctagttagaacttcataaataagaccacagtatgatgctacattctcgcacttaagatctaacaaattcagtccaccctcttccttggtacgttttagcttctctttgcttgcatgagccagtttcttctgcatagaggggccactccctatgaatttacaacataagctctccacctggtccaaaatggttgtaggtatgatgaagaccttaggtagattacacagagtgtatgagctgtaatctcactgcatgtgacaagctcctcaccttccaatttgatgttcttttaatgagctttttagtacacagtctttgatctgttgccttgtagctgtcaatgtaatcccaagtaagtcacacgaggtgtaactaaactaactccaaaggcatttgcaaaagcattcttctcttcagtagaaagaccccaatttaataaggttgtatctgcctgctgatagagagaccattagcatcagcgaattcctttagaatattctgtaaccccatatagagtgcatacctcctttagaaaataatagaacatcatctgcaaagcatagatgaaaaaaccctgtccttttacatttagagtgaggagcaaaagttttagtaagtccaagatgttaaaagagagctaaaaaatcttcataatcaacataaaaatataaggtgacagggtctccttgcctgagacccctcttgccaggaaagtaagatactcaagtgccataaatggtaatggagtaataaggagtgcagacacacattttgatccatttgataaagagtggtgggaagttaaaagcttgataaacaagtgaaatgcagtcccaacgtactgaatcataggctttactatgcctagtttcatagagcatttaggggttcctctctttctagtgtagcttctcaagagatcatgagagagcaaaaattatattcaataagtttaccaggaatgaagaatgattgggctcactaactcagaaatgaagggactgtagtctaagcgttaaaattttagagacacactggtaaagggtcttgcaacaggctataggtctataatgagtgactttagagggattcttatgctttaaatatgaggcataggaaagtggagggtttaacctctccgaacaagctgagaagtaaaaatgaaatcggtagctgaactttattacttacagtggtccaacatattttgatgaaacctgcattatatccatctgggcctggaaagctataagtttccatagaaaataaagcagtctttatctcctgttcagaaaaactcctttccaaattaaatatttgaatatcattgagtttagaaagttgtaggttgacaaagaattactttgtgtttctttcttcttattgttgaatttgagttttatatttggagtgttccgtgactttgcaactcctattgatcttacatcccttagacagttagaccattatccattttcaaataattatttcttgcatgtacaaaattgttcaagaggactcgttttgcaaaattttgagcattccatgtactcagatatagtgagagttgataagaattcttgattattatgtgcatgttcttttgtaagaggttttaatgtagttctttgcaggtaa

SEQ ID NO: 14457 - DNA, 2329 bp, Aquilegia coerulea
  Intron number 5 from transcript AcoGoldSmith_v1.010209m (l ocus AcoGoldSmith_v1.009363m.g) derived from phytozome v7. 0 (chr-ID scaffold_9; pos 3117188 to 3119516 reverse stran d)
tagagattcgtgcaacaaataagctcattcaggaggtaagccagtgggattgctttgtttataatatttggcttgtactattgaatatacaaggaagaaagatatctattatctatcaccaactcctgtaaattgcaaatataatatcgaggttatcaaacaagtttcactattcatacgtgaacaagcatttgtgaaaacatggaattgtttggcaccctttactattataaaatgcagtagtattgtatgatgaattttttaagtagcaaaattacaatactacaaaacttaatggcattgctaagttttagaaggacccttatttctgcatctaatgctcataaagttatcaaatatagagtgtctgcttaggcctttacccttgggtgtgaaaatatatataggaaaataaacaggaccattttagaagctttccctttcactggggacttgcattattatgatgaaaaacattagaagaataactggatgagcgtccggtcaaacttattatcttgaagcagctaagtagaacttttaggtgagcataagtacttgcacaaaaattgaagctgaatgggaatataccatgtcagtgaacgtatttgcataattaggaacatttcagattaatcttaccttgcatatgtcggatttagatctgttcagatgtgtgtaatttatggagtccagggatgtaaccgccatccatagtcctttaactataattgatgtaacatctatatctatttgactatgcagttagaggctcaggcgacacctaggcgcttggggacttggggtgagcctagagcctagcacatccaccctttttactgaattacatgtaataattatgtaatatatattcttaaacagaagctcacatttgattccttgactaacaaacaataccagagaggcataggtacatcaaacagttatcataaagagttcaagactaataatttataatactacttaagtttcaatcgaataaaatcatacacaagtgttaaatagcaattagcaagtagaaacaagcaaaaaaaaaaaaaaaaaaaaaaacctttttatgttcaagttccatgttccaacttcccactcaattaatcatccacctccaaacccaacagatccatatgggaagaagcagaggcaagaggagagaagagtggaaaagaaaaaccaagaaagagagaagacttctctgcgatcatagaatatatataccctagatcaatctcgtaggaataattaatatgttgggtttaagtaaaagttggataaaatctagcccaaattgttaaaaacacctgaaactagaccaagagcctaggcttacgcttgagcctagtgctaggcttataggcgcgagcctaggcgaccaaaagggaaactgagcctaacacacttgagcaccacctacaactaagcaccagacctcgcttttagcctaggctcagcacctgtgactgcatagctatttgacatgctttcttatagcatattcattaggttctggccttgtatgagggggaggtggaaaatatatttacctcaccctgtttttcacaggcatgtggtctgtcttcaattaatcggaataggtataaatgaaagtcattcttcaatagtgcagaatggataaggacttcgcttacatagtgtgtgaggtaagagatctgaattctggaagggtattccatgtcaagtgaaagtttattcaccctaagcaatgccatgttccttttgttctggaatgtggggaacagaaagaagagaatggagcccaaggagggaattggggaaagggaagaggagccctttgggtgtcttttggagaaaacagcgggatgttgtgtctatgagttggttttgtagatgctatttgtgcaaaatgtttaaggctggtggtcttgcaattttattagattttacaagtgacactttctgttacaacttacaagttttgtttgagtctgtccgaagatcaaacttttgtaagatcctgacatgagtggcctgctaattttcagcgaattaattgggaagttgcctcatgcagttaatttttcccatgtgatagtagtacatgtattttgttaaactgcatgtcatccttctattttgcctactacttggaatgtaatatttgtttgggttattcatgtgtagtttcctgccacctcggaactccaattcatagcacatgtgtccatttttctttgtagtatttatattattgttgacttactaatctgaaagtacatcttatttgtttctcttaggttgaaaggctgatcaactgtggaagttacccctc

SEQ ID NO: 14458 - DNA, 4248 bp, Aquilegia coerulea
  Intron number 2 from transcript AcoGoldSmith_v1.004145m (l ocus AcoGoldSmith_v1.004155m.g) derived from phytozome v7. 0 (chr-ID scaffold_16; pos 4586065 to 4590312)
ctttctcgtttgtaagtttgtaacgcaaagcaaaggtacttatattattttttctctgttatttaaattttatttatatcaatagtaacattaaagcacatgaaaaatttcgtaactctttttctttatgtaagatttagaagattgcttctttttaaaaaaaaaaaaaaaatctgttaaatgggtattgtttgatttgttgagatctttaatgggtactctgttgatttttctttaatgcaatatattttcttcataaccctggcttttatgtttatgtatcagaaaaaatgaaaagaaaagaaaacattaatgcacatgtaattttctttgttttatgaatgtttttagcaccaaaatcagggttctatgtctaatgaaagagggggcacttaatctttgattgatgaaagatgaactctaaccttgttatagaaccatgatacggtggggattgatgtttaatttgtttgtgttataaagttataaacaagccatttttaagaaaataaaaataaaacacccaactagcaatattactagtgcggtgtgatttattaataaaggaaataacattacaaaaattgtgagatggtaaactcccaacaagtgcaccaaaacccatttagctagtttatgaccctaaatattaacatccgtgcgaacatgataaaagatagtaagacatggatcttgtttgacatcataagtttaagataaatgaattgatatttctagtcactcaagtcgacctgatggaaagatatgaccaccaaagccagagaaacccaaaaaggagctttggataatcaaaagagcaactactaccaataatatggtgacatatgacaccgctattagaaaacctgttggaatcttctgagtcgccatccacacaacaacccgaagaattgccttgaattttaaaagaattcaaatcactcaaaattttcacgttggttattaggttgaccaatttcatcataataagttgaaaccgagaatcgacctaagttattacgaatttaataattttcaagttgtctagaatcagaagacaggtctatgattgtaactgatggggaatctggaatatcaaaagattccccacaccctttaacaacacttttatttgtaaacagacacgttctttttcccgttcattataaaaaaaatgaacatgaagttgtttccattctccgtatattatttttcaacatttaaattctgagattgttttagtttttcgaccatatacttctatcttaactggactgtaaaccaaaacagacttttgatttttacccataatattttggtcttcaatatgaatctttacttgttgtttgagcctttgaaactgaaaagtacccctattttctagagagagaaaaattagttatggaaaaagatatgtgaataaaattatttattatggaagagttgtgaataagtttgagaattgtatgattgagacgattatatacaagaaattaatgagtgaaaatattctgcaaccaaggaatatgtaataaaataagagtgggtagagtaactttttgtaagaaatggagggttatttatagttggttggatggaattagtaaacaaacttttgatcctattattttgaaaagtgaacaaactaccaatctaccatgcatacgaattcctaccaaccaactataaataagagttttctttttatagaagtttgtctgtatattatctttttactacattttccatgctttcagaatactcttactcattaatttgtctcagtcatataactctcacactattacatactatttttcccaattcttccataataaataattttatttacatatcttctataaataattcatttttcaaaaaagcgggaatactattcagtttcaaagactcgaaaaacaagcggggattctttatgggaaaaaatcaaaaaaataatttggtttacagtccggttaagacacaaagtatggtaaaaaactgaaagaatctagggatttgaatgttgaaagacaaacttcgaagattggaaacatttctttttcttgttcatttttctttatcatggacgggaaaagaacctgtctgtttaaaaataatggtgttgttatagggtatggggaatcttttgatgtatcagattcctcatcaattaaaatcatggacgtgtcttccaattctgatcaatttggaagttatcaaagtcacaataactattgtagattcttggtttcaacttattctaatgaagctggtcaagatagctaataaccaacgtgaaaaagcaagtgatttgagttattttgaaattcaaggtaattcgtctggctggtgtagatggtgattcaacggattctaacatgttttttaatagttctagcatacgtcctgattctgttggtagtagctcttttggttatccacaccaaagtcctattctaatttggtcaagctcatcttctggttttcctagctctgatggtcatatctctctaattgttgttttacggacgattctgattgttcgaagtcttggttgttttatgttaaacttatgttgttatttatgatctgagtcttttatttatatttgtaataaggttaatgtttgggctaattaactggataaatgggcttgagaatctggtgtttggagtttacaatctccacacttttgtaagctaatttcctttgttaatgaaactcattgataacatagctagttgggtgttttatttataaaataataaaattcaaaaataattcacaaaaattaattaataacaaaaacaaactaaacgtcagtccccaccgtatcacggttctatattatattgcaattttaagaattttttttctttacttttaggtttaagtatttcctctaatgcacggacacctccctaaatcttacgcaccggtgtctgacacgtgtccgacaccgacatgcccaggacacgctgggacacgtgtcagacacatcaaattaagtgtcctacctgagaaaataaaaatttctaaactggacactttcggacactgttggacacttccggacactgctggacaccttagctaagggataactttgtaattttagttttttgtaaagaaagtgggtcagggatggaataaaaaaaacatatttgtggagagagaaacaaataaaaaatctttctctagaaacttctctcacaagcctcacaagtctcaagggtctcacctactctctcttcatcttctactttctctctctctctctctctgttactttctcttcatctattctctctaagtttgcttctcttaccttcttcatctttcacaagactttgttgcttctctggtctccatagaacaaccatggcttcagcttcaacagatggtagtagtgcatcaacattgttacttgtccactctatcattctctgtacaatgtgttataaagtatgctagaatatatatgtcggtgtcctactttttcagaaaattacgtgtcagcgtgtccgtgtcgtgtcgtgtcggtgtccggtgtccgtgcttgatagagtatttcaaatgatggggtaaaacacctgatgataaagtaataccactgccactatatattttgcttaatagcttgaattgattaagaatacccttgatttgataaatatttttctaggcaaatctttgtagttttttttgtgatcaaccgatatagtttgatgttttgacattgtgatgtttccaaccacctcatgtccctctgaaggggaaaaaaagacaaaaacaaataaggatggtcgattcagggagaagttgtatgtatttaataaggatcatgttgaatataagagaaccaatttctacataccagcttgaagcgcgaaagaaagtttttgattaataacatactcccaagacttcttgtcaaatctctttcgcgcttcaagctggtatgtaaaaactgattctcttatattcaacatgatccttattttgctgatttccattacaccttctccctgaatcgacgaaggatccttctttgtttttcttttcagagtttgatgaggtggttggaaacatcacattgtcaaaaacatcaaactgtattggttgatcacgaaggagaaactttaagatttgcctagaaaaacattcgtcagatcatgtttaaccttttagattgcttctttgtcctgtcccttgattaacttttgttcattgcttatcatagtc

SEQ ID NO: 14459 - DNA, 3140 bp, Aquilegia coerulea
  Intron number 1 from transcript AcoGoldSmith_v1.003547m (l ocus AcoGoldSmith_v1.003547m.g) derived from phytozome v7. 0 (chr-ID scaffold_19; pos 1501867 to 1505006 reverse stra nd)
gtgttggctcttattccaaggtcccatctttttctttttcttcaatatttcatttattattatttcatatgtttgtttgaatgaatggttatacattttcttaattttatttgattgatcccaaaattgtgattagatgtgaaaaggggttgtgggtttgattgctgggaaggagagggaaacggtttttaggtgctgattatcttcattatttagcttaatttggatgaaatctgtgaatggattgaaaaaggaagtaaattagaagcgattcagaattcttacaccccaaatccttcttggatctaatggttacaaggatttttattttatttttattttttttctaaatgttacaaataacaagaacaaaaatcacaaatgatgcgtagcaaagcttttagaatcttgtgctgatgttgaaaaactcgatgccaaatgttatacatattctatttatatgaagatgggtggttggcatctacctttctataacaatgctagtctctttcgttaagatttcctatttgttagaacatgtttactatcacaatatgttcaatgtggatctagcagtcaaagtcatcatcatgtaacaaggccaatttttttcaaggaatttaaagaaaactagatataaaacagacaaacaaaaccattggattgataatactcaacccaaccccaccccggtaatgttacctcagtgtgagtggaggcaggaaataacatgtatttcatggagaacaccaataggatgctttgtgtgatagttctttggaaataaagacaatttttagttaaaactaaaatgccagaggctatttctggtatcttattttctataaaagcatcatataataattactactcgatcatccctagaactattcattgaaagccaagaagtaagactaaacaaaagtacaaaaagttgacgtttcttcggtgccctattaaaaagttggcgccgcgccgctcctgttcatgaacccctcaccaccatattcactgggttggtgttccaagaccaaatctggtgttgcacaatgctgaatgtataacaaagacttgtaggatgaaatgccttatacctctaattattgaaaacaattagaaaattaataacaaatgcatggttgagtcaacggagccattgaaaagatttcattaatgttacctattacttttactatttcaaatgaaaataaaatatattatgtattaaagatggcttatgatattggcaatttagtatagccgccgccctttttgttacttatagattttccaattcaatgatactaacttaatgaagttgttctgaagtgaatccatacttttaatgagtgtagtgtggtagtgaaaaacttttgattgccaaacaccttccgtccattttcacctatgaaaatcttcatttatacaagaccgaaagccaacacagtaataacactggatatattttagggtgagaaggagaataacagctaagaattgaaggacatttatatcttctatcaccgtgttttctgcaataaattgatggatttgagggcttgtgaaataacaataatagagatcttgatcatggaaaaagtactaatcgaagttaaattaatatgaaatctagtgaatatggaagaagatgcaaactattatagaaacctttcaagaacttgctgccgttgtgcctgaatatcactgaaatgaagttgaaataaaaaaaaaagattaccattttcactagaagatattttgagattttctatgaacgtgtttcaacttttaaacgtaatttgattattcgaagactaaaacttggtcgaggttaaattttagacacacttattggtgcagcgtcaaggtcttgaatttcttcttctaaagctctttggagatgtcctcatctgcgtaagagggttcatttatcttccatcttcaaatttaacccattaacctcagttcttgtatttaaaatattcaagttacccataaatgtggggggatccatggatctgatgcaggggaatctaatattttttttaccctttgttgttattggtcttctacactaaaacctattgtatgttattgctactttggtttttgattttgcacgtgaggagattgtcatgactcatgggtgaagggagctgttcagtgttcagtacttaggcacatttttacttacaccgaatactaactgaaaagtttggaattaccttattgattttttatttttttttgataaataaaatagttcccgactttaggggcggtccacatctgatccctcggtgctggttgagactcatactaccttaggctcacatcacaaacctttatagaagtgcgtttttgtgtttatttttttgaatcttctatttgtttttttctggtagttctagagctaaggttgatgctctattaaaaagtaggcaacccaacttaagaactaaattgggggaaaatggagtgtgtttccctcttttagtagcaagatacaaatgcaggactattctacactttcatttttctggtgggtgatgattgatgaattaatcaatgggtatatgccaggcagagtatattaagttattattaaacccttactcatttctggtgtactttatatgtttgctgccttatgtttttttgtaatttttgaaactttatacagttactaccatacattttattgttgaatgttgtaaaaaggaatcaaagcttagctttcttttaggtcatttaagaatgataaatactatattgcactctcgtatggtaatttatcatctagttaatggatttgacatccgattatcattttgtaactctgtttgctttatgaaagagcaagtacttgtattctaggactatattgcccagttgttctactttgtgatcagtttaaagataaagaaagaatatctgcatccatgatgtcaatgacacatttctgtcgagcacttgtaatttggatgcctattacgttctttggtttgttactaacatatctttgttaaccaagcatatcttcatgctattgtattcaaatatcactagtcattccttagaactgaaattttaaacccttatcaggttgttagagcaaagaagaaggatacgggaaaggt

SEQ ID NO: 14460 - DNA, 2117 bp, Aquilegia coerulea
  Intron number 1 from transcript AcoGoldSmith_v1.008072m (l ocus AcoGoldSmith_v1.008072m.g) derived from phytozome v7. 0 (chr-ID scaffold_3; pos 7315339 to 7317455 reverse stran d)
gaacagactgtttcttactcaactcagtggttcaggtatggctgtgatgttgttttaagattttgcattttttttttttttgatttgcataagttctgaatattcaattatttttgttgattaataactttgaattttttttgcaaaaagttgagcttgtaattttgtattaataatatattagttacaaaaattacagtactgagaagttgcctcacaaaaccctgatacagaatttcccatgttacaatccaagttgcccttcctttgaagttcagtcatcgtcagccgccaaagtagcacccttctaaagagaagagacaagactgcagcttaccccttaagtgtattcgaacccacttgcatagttgcatcctccaaggaagagatccctgtggaaatgcttggttggctgcagccgagtccaactcaacccagatatgtaatcattgttgttttttacattcttcattatagttactatcaatgcccatccctgctgccttgaccaacagtaatttcccaaaattatcgcaaaaatcacaccctatcccaaaaaacttagaagaagaaccaaataaggtatatgggattttcattgattttgtaatttataattttttaataatttacttatatatagaaaaaatcagaacagcggagtatggacctgcggtccacattttgagtaataaataaattaacattatttctgacttgttcaaccacctacaataaaaggcgtttattgagtctgatcttttggtaggtatgtttgatttagctgtatgagagatcattactagtttttcttttgtggggacattgtgttaaagttttgattgcagaagttgataatatgttttattgtattatttacagttattttttcttcttctcatcatagggtaaaattattttgttaaatgattaagtgaaatggtaacaatgttatcatctagaactatgttaatggtctagctgtccagacgataggagttataacaagactacgagcttccctatgggtcagttagtctgctgactggtttgtatttgattcatcatagattggaaacaaatttagtagacttaattgtcccaagacaagaggagattctctgaagattgaatatacagtgttaaaaataatttaaagtgacattatcttgtattagttttattttgcaactagtgttttttatagtcaaatgacaatcacagtggaaggcaatattaaagtgtgaaaagttacatgcacgctaccctacagactgagctaaattccgtggtagtttttgtctgtcaaaactgtgagatcattgaaaactttggcgtgattcaacaaggtaaaaactgagtctatttgcagatgtggtgatagagattttagtggcacaacgactctgccaagaacacatagccctttacttttaatatgatactagagttttgctcccatttacatggtagctaggcattggatatatgaggattgtatctttcatcaagttttgaatacaaaagcaataaaaatagaaattatatgttagcatagaaagtgatgagtgtcattcgagatcatttgacatgcaaagattaagaaataaaagggtaactaatacatgctaccatggtaatttccacacgtaatttaaaggggaaaaggtcccctcaaccctgcttgccaatcaaaaaaaaatacactaatacactaatacatgctaccatggtggaggtgtatgccgcaaatcttaatagtacaaaaggactagtctgatgtgtttactgtcaaagtacctctttcatctgttcattgctatatactgtatatgtctttgaattatcagactaaatgtttcagaatattcatcttttaagttcagagttttctgctcacttgataaggtgtacaaactgtggttcttatgtaccagaggaatgagaacaactggagctgtttctaatttttcatttcgtgacattatattaaaaagagttttttgatgagttggaacgccatatagtcggtacaaaaaaagaaaatctcatgttttacgttttatatactttattagtttgctaaaagagttaatcccatcttgatactgtaggag

SEQ ID NO: 14461 - DNA, 1476 bp, Aquilegia coerulea
  Intron number 2 from transcript AcoGoldSmith_v1.002196m (l ocus AcoGoldSmith_v1.002196m.g) derived from phytozome v7. 0 (chr-ID scaffold_18; pos 1921787 to 1923262 reverse stra nd)
ttcgcaaggtaataataatgttttgatctgttttagcttcagtttaagagaatctgaacaagtttgaaatcaattttgttgtgaaattgagaatctgattgctataggttgatttgatttgctaatttaatggttttatacttgattgatctctctagtagtaactgagattgtagagtgatttggattgctttaaaagaatgtttaagtgtgattgttttgttctttgaaattgtgcaattaagttaatcaagtgctttattttcaagttttggtgataattttgatcagctctgaaatgtgcgcaactgtgatgttgaagaattttaggatactgttataaacaatccttttttttattaggtttatctggattagggttttacaaggcttggtctatccctaatagtaattatggtagattaaatgtaaagaactagataggaacttatgagattaggttttcatttagatctcaaaaccctgcttgtaatggttttcagaggtcgtgatagaatctgttgcatttttatagtcacatctagttttactgttgtaaaccatctatttgagttctactgatcttagttaggatgaggttggtgagccattgacaaattacaatggtattgcttcaattgagaatttgcattaatatattctgattgggctttgataactgctgtgaagaattcgattattccatagttgttcaagaaatactcgagaagatttgttgatgtctcatcatattgcgaatagattagtcatcagcccctattgaaatctttcttagtagaattaaaatgcctattggttacagtttggtctttgcgttccatttggatcaacatactagttacagaaagataatttcatcttctgcttgtgaaatttgcattacttttagagaataaatggtactccaattagttaacatgccgagttatattatatgtttgcatccgtgcttctgcttatatttttacgccagggtatgtaacatgcctcatgatgagaaaaggtaaaacaattgagggaaataaaatagtgttcagaaatggtgtcttctcttaagactttaccagggtcaatcagtggcctaccacttttaggttgaaggatttggtgctgtaaccttatcaggaagtcgtgttttgtttctttcacacatatttaccgagtttccctttttttattatgatatgcatccgagatcaaaatatctatccgacttgcttctcatgcttgtcaatttgtatgacatgtcacgtattatgtttgcaatatcaaattttgaatgcctaatattcatttttattacagttgcatctattgacgtgccacccttggctactctgaaatatgtagattttccttttattgtcaatagttgtggtcgaaacttcatggattactttctaaattttctttatcatttgacaggtatctggaccagtcgttattgcagacggt

SEQ ID NO: 14462 - DNA, 4325 bp, Aquilegia coerulea
  Intron number 2 from transcript AcoGoldSmith_v1.007382m (l ocus AcoGoldSmith_v1.007382m.g) derived from phytozome v7. 0 (chr-ID scaffold_114; pos 327865 to 332189 reverse stran d)
aaagaaacggtatgtgcttgaaagaatttgacttttgagattttgatgggcagaaattagttgttattctttgttattaaatcaaaagatggatgtgaacttataatgtcaacaacattaccttcattacaaagtggcatatttcatcatgaggataaatattgtttaggtattgttatttgattcataagtaatttccctagataatgtcttttaagagagttaaactaacaagcttaataataaatagattcaatacaaaatgtggcaggggatgagatatcccatgttaatacatcaaagatcaatggcatgctatagcaaaaaaacatcgaaggttccctcaagaggagacaaaggtctcaatggcatgaactggtgttcttgccagttcttacattaaagacatagaagatctttgatgtcaagaattgtatccaatatgtccctaaccgtctcctgaaatgcctcatgtatgccatccatgtcttcgacagaatcgtgaatgggatgatactccataactccttgcttgcccctgagggagcccttaggttgcgctatgtcgagaggagatcactaaccgactctgtactcactcatacagccaaaactaatccaggagaataagaccaaatatttcccaggaaacgattccgctgaaataaaacagacactaaaagaagaccaccaataaaagagagagactctaagggtacattaattagcattcccacagtacttgaaagggaataaaggatattgtaaactgggagggtgcatcgggtaaacaagcaagagggccaaataccaggatttagcgggaaatcttcttttatctccaaggacccatttttgtcaatcttcctgtaagcgtggaggagggttaccaatcatttccaaaagaccatctaaggttttgaactccaaaacattgaaagaatgccaaatcaataacctaagaagtattatcattttccaccgagatacaaattaaattattaataacagaaagctgcaatcatacatggcatagtaaaagttgcgtatcctgagtcttccgcttctctcacgatgcctttccaaacaccgcgaccatagcccatagggggtggaagcttggtgagtttcctaccctaatggtgccacaccatgtctaaaggcaagacacgcgtccaagctggtcttgttcaatgttcactctgcatgatctccacaaccatttggtaagtagttccctattcacgatcttggtaaatttcagtcctagtcctccttgggtgcgcaatcactttactagatgatagccgtgggtaacctcagtgtctccctaaagtaaatttcacataacattgtcttgttgctttactactgtagctggagcttggaacaaggacatatatatagtcctaccatactgtggacattatcttggttggaagacatgtagtagccatgatggtctttgtcgtgcctataaaatcgcggatgggagaatagacatacacgtgtggctcccaagagtgtgttttcggattttaaagtgtatctaaccaatgttgtgagttatacttgtcctgtaagactagcggatgaggaaattgaatgtggaagggagctcaaagctggacgtgttagctgcatctcagatggattggacttataatctcaacacttcactagaacttatgatgaaatccaaaggttcatccgttagcacagtctaagacactaactggttctagcagagtctgcaataaatataatacctaggaaattcaaagaattttttatttaataaaattagagttattaccaaaaccaagaatttacccctgattagagtgtcgcagtgcgccgtcaggttaccaaactcatatattggcagcgtttacaaaacgagatacactataatcaaatatacacaggcatacgccagaactgcagttccttatgtctgcattcctgtccagctactgtgattgccttattgcaattctttgcgctaccactgccttcttccaatgctgtctgtcgcccttgctgctgctgcttaacaccccagtagttctgctactgttgctctgaatccctccatatactacttgtctaccacgagcaatccctgcaaaacgtcaccagtcatgtgatgcctcctcaaatcctttgctttaacatccatgtttaaagatggttcattgttgaatatcctgtctaacaatggaactcgatggttgacttctttctatggcgaacaagtgagtcccaaaattacagagtagatgaagaggctatccacttatgtttcaattgtttagattggagcatgcatgtgaagttttcaacttttcaatattcgaaaagtggaagatgaccaatgtacagtacacaatcaaaaccataaatgtatacaagagttttggccatggctttttagtgccttatccattttcagaagatttccatgtccagaggccactcgaatcttgtaggatataaaatctgaaaacaccctttgctttcatcttttattttattttaggtttatactttttcctttgttttatatttcgatatagataaccttgatgtacatgagcttcgttctatatcatccgttgcaagaaatttgggagattacctgcccaagtcctaatgtattatgtctttgcctaaaagatcattgtcacttattcttcccgtacttctcttccacaatataaatctcttactttattattgacaaagcttttcgacaagttgatgagaatatgatggaacatgtgatggactttctttgaaagaatattatatgcttacgctttcattgatttcattattttatacagagcattcatactttacttacctcagacactctcttaattcactggacacacttctcagtacaccatttaggcagtcgtaagagaagtacacatttaggcgcaatacaatgacaaatgtatatagtacttattataacaaaagttggctttggtcgggtggatatagatgtggggaaataatttttggtacttatgttggctacaagtttgtagtgtcaattctggaatgtgctattttcgacttatcgtagatcaacttttaactaatcttgtatttatactgtagttacaaaatatgtggcatttaggtaagacacattctacaccctgtgacaagtcctttgcccccaatggggacgttatcttgactcaggctcaatcatgctttgctgggttgtcttaagcaaccttcatttaaaagtacatgaagaagtttacaactcgagtttgataagtatgatataagagtatagacatgttgccgagatagattttcctcgaaaatatcagaaccaacatgttacatgtcagagccatgattaaatgcttcgtttgttaaccaatagttttggtttgaagtatcagaactaaatttttaactgaaactcaacgaatagctagttgcagattttttttttataaaattaggtcatttttttggagacttaagaagcttagacaccatgtaatctgtattgctcttcttcttttagtaaaattcatgcacatccttaaaatcaactgatggctgtagcccagaaccattaccaagaaactttcttaatatcggaactggtgttacttagctagtagtacggatggctgatattgatattgtattgtgagaatgtgaagtattaggctttgattggataccgacgttggccacatttttctgttctaacatcttagcaagctgaagtagctgatgtactagggttttatttggtgggctttcaatcatcatgactaggcactacatttgaaggtaaaagaacacaagtggcactgaagcctctgtgacattatttggatttaaaggcatcaattatcccactacacaagaaggctcagttaggattttaggtgtgggtgtattgcattggtagaagatgtaatcattatcaatgtctaagtcccaaactgatgaacaggaaagtcttagccattcactaattgtatagcccaactctgttacttgtcattataggttccaatagcagtgtgttgtccctgtacccattactttatagtttatacaaagatattgttgttcttatatgcaaatggaattgtgatgttcttctcaatggttctgtaaaagatgcatcacgtttctgtgtttagtagatgcctcggtgttaattttattctggttgttttatttgctcctaaagatgcatcatggctaatttacttctcttttgtttctgctgagcaggagttgctgccactctttaatacgaatcaagaaaa

SEQ ID NO: 14463 - DNA, 557 bp, Aquilegia coerulea
  Intron number 6 from transcript AcoGoldSmith_v1.000234m (l ocus AcoGoldSmith_v1.000234m.g) derived from phytozome v7. 0 (chr-ID scaffold_17; pos 4608183 to 4608739)
attcaagtgcaggtatggctctattaatagtaacgctactaaataaatttgactacatttttctccttggcgttagagattttgcctgaacaaggtatcttattactgaaggagattagatttatggcctcaatcacactttcaaaatattctctcactgggcatcagattagtctgaaaatctgaatctttgtttacaagagaatctgagtagactaatattgtttacagagtgtgctggccttgttatcataaatccaaatcataaataacacagatttcaatagatcatacaagaaggctactacatatagaattagcagtctatacaagaaggctgctacatattttgctcaaaagggtttagttaggaagttacattatatgtggcaacgttattaatctcatacctcattttttctaaagtgggtattgactcttctcttcactcacgcagaataaccatattgaattttttgatctattgtttgaatatgcaaatccaatgaactaagaatgtgtaatttgatccttgttagataaaaggcctccactgg

SEQ ID NO: 14464 - DNA, 4458 bp, Aquilegia coerulea
  Intron number 1 from transcript AcoGoldSmith_v1.004448m (l ocus AcoGoldSmith_v1.004448m.g) derived from phytozome v7. 0 (chr-ID scaffold_11; pos 2516371 to 2520828 reverse stra nd)
ttcaatcctcatcaccaacaacaacaacaacaaaggttcttctctttctctctctgtctttcaatttgcttcaattgattgattagttcaacgattccttgtttgtttcttatttatgtgaaattaggtttttaattagtatgttttagcttcattttcttgagttatttgtttctaatttcaatgtcattatccactagtttagatttttaattagacaatggttagattcttaaggttgttctttttttctttttttttaattacatgattatcttgatttttttgtgtttggctgaaattggacagaaatttgattgtgatttgagttggtaattaactaattataatatcaatgctgttcaactttttgatcaacttttctgccgtgtgtgtgtgtgttttttttctttctttctgaaagataatgttgagttctattcatgtacgattttcgttgataaattagagcaaaagtttggttcttcggaaaaaaagaaggcttgtaatacttagatagatattttgattatagctagtatagtgtattaggcacgcgcattgtgcctgcaaaatatgtataacatgttattttgttttaaagagaaagtggaaaaacttagaagaaacagtgaagtatgtgtccatgtccgatttggccaaactgatgtaaaatgttcatgtttggataattatcaggcattgtttggatagatggtttataaaaagtgtcaaaagatgactagcactccgaattctttaatggaagtaaagtatgtggtattctttgacttagaagaggaaccgaaaaataacttatctatatataccaaaattttcagaattatattaaattttttattaagatacttaaatgataaaactgaacctcgttcatcctctccttgttctaatgtttggtcttgaacgctgcatggtcacccttgttacaatacaagcaaatcgtttacttgttttggacaatcttgacaaattttacttgtttttagctattaaacaacaaagagggtatcaagtatttctacaatcacttttggaatataattagtactaactttacttcttctttttcatttttaataaatctttattattaacgaattaaatatagaaaagaagtgaaacgttaccaactttgttcctgacatcgttggtgtttaactttgtatactgtagatctacaaatttaattagtaatgaagtaaatgaataaagttgaataagtgaatataaagctgttaataagttaatttaaattaacagctttatattcacttgttcttttcttattcagctttatccacttacttcattactaataataaatttaccattaaatttgcagatctacaatatacaaagttacaaacaccaacgatgttaggaacaaagttggtaaggttttacttcttttctatatttaattcgttaataataaagatttattgaagaagaagaagtaaagttagtactgattctgttcctgattgtagatatatttgataccctctttgttgtttgatagctaaaaacaagttttctcaagattgcccaaaacaagtaaattgtttgcttgtattgtaacaagggtgaacccatttcacctcatttgaccaataaacatagatgaagtaagaggtagtttgcacaaagagagggggagactggaagggtgagttagttccatactcatttcacgcctatgttctatatcttcatgttccattctccttctcagtttcaattaatacagttctttctaactaaagagactgatggtatgctctatcttttgaccacagtctctctgtatggaaatgtgagacttgtacggagtttaaaagagaggtagagattagaggaaccagtttcctttctataactaaaaatcttggcaaaaaaaaaaaatgcacaaagaaggaaggtggttatctcgaacgtcctttcctatatttcctcctaaaatgtctttcatttattctaattaccatctggcccttttcacaatggaccataacaaaataactacaaagttgtctataatagatgtatagtgttttggaaatctgtcgaacgaccaagcgaggtagttagtctaggaggcttcgctatggaagagactgcgagactttatgttttctataatgtttggaagcttcatttgccacttagttataggtattgtgtctgtggatatgatgcactgtagctagtgtatggtatagaagctattataggccacctcttgggtggaatggttacagttgaagtagatcaaagtttcataaattattaagtaataaaaaattaatatcacctttactgtttgaaatatacttggtagacaagaggaacaaaattagttcattgaggatgtctcgaggatacaaatgaaattagtttcccctttaccactatcgtttctttgaattaattgaaaatatatttggtagaggacaaagcagactacagtactacatttacagaaaatcaatattgtagtatgaatgctcgatatatatattgcatgcttgttggaacaaaggaacatttactgctttgttggccttgttggatatcaggatgggaccaactagcttgtttgtttgaataattattgaagactaaagaacactcaatgtctcaacctagtttagattagaaaaagaagacactcagcacaattagtttgttcaatatacccgaggttaaaaatgttcacatgccatcctcaggcttgttgagtttacagcttaaatactgagcttgatagcgccaattactagatactaggcatcaagtatttacactaatatatctctttaattatcagtaattgtgatggttttaaaagttgcgtatgtttgttctcagaaacctctttcttgttgctttgggacacaataaggaagaaaaacatcttgatacatttttatttcgactcttgaatacttgatgttgactatgattggatcttcatatgtataaataattggatcactgcaaagcaagactgagagacatcattcacagttccgagttttctacggtgaaaggccagtaaatacttgattgttatttcatagccaatcagttcctcaaactgaaatgaaagaaggtgaagcagccgtggtagtcaaagttgtcgtatggaaaaccttatatcatgttgcttggacctttcttggatttgtactggttgtatatatctccttttgtagtggtgtgtggactagcaaataggtactagaggtgttatagataattacatgaataggttgtcttgtgacaagaatgaacacattttcagactaacatgatggtgggtagaagtggactagaactaaaagttgttttaccctgtgtactgcataggaggttcaacgagtggcgattagatttgttatggctttagttattgggtgaagttcttttctgagcgaagtctggaaattatagacagaaactttgcaccaatttttattgacctgggataaaaataaaaaaggtggttactggttaagtaatagttaaatctacatattttgcaactttgaactagtctgtctgtattgctgtatttgaaaatcaatactatgttttcagttacaattagtttgtaatattttgttctcttacaatccatgctattttacaattaaagcaaatactcatatttgaaatgtgttagaaagatatatgtagtcaacactcgagactagactacaccaacatacatgaactatgagagatatatgtagtgcatactggttgagaaccatactaagagggttggtgcaaactgcccgtttgcgaatggaaagccaattatgaccaaaccagccattgagttttttttcccagcaaccattgtaaattaagacatggtttggcctagtgttttttttatttttttatctgccttaactcttttgttccatttccaaataatgctcacagtttcagtaaaagttatatcatgttttcttgtgatctagatctttaaaatgtattttcatgatttcaccaacattttcccacctacaggtatatattttgataagaaattcacgttccgagatacaaaatttcaacgaaagaaacagagcccaaatgaaaattaacataatagatagttagatacaattagtagatcttgtgaattggagagtaagcagaaatcatgaatgtcatgctgattcttaggggtggatattaatgatgatatggattacagaataattgttcaattctaggggtatagaaattttgtagttgccttgtaggtagagctttgtattgtttgtcatctttgttttgtttttgttactttaaacaagaaagtttgatatatttatcagtgttgaaagtttgtacgcttctcctttttcatgttctcatttaatttttctcctttgtatagttggtgcttccttg

SEQ ID NO: 14465 - DNA, 3700 bp, Aquilegia coerulea
  Intron number 2 from transcript AcoGoldSmith_v1.008770m (l ocus AcoGoldSmith_v1.007590m.g) derived from phytozome v7. 0 (chr-ID scaffold_17; pos 76914 to 80613 reverse strand)
gcaaaacaaagaagatcagtggaagctgacgtgaggttgttaatatttttcatctttcttttctttttgatttctaatttcaacatcttatttatcttcatctttaaatgatttctataaaattctatagagagtttaattggtttgggttgttttgatcttagatctgtgttgttatgatcatgatcacatcttcaattctgtagaatttgttacttttggtttgagatatgtgtatattgctaggtctttgattcttgttaggttcaggttgatttgaaggtctcatgcctttttagatttttttttatttattcatgtgttccttgctaaaatcctgtaatatcaataccaaagatatgagatatatcctattagttgcaattagatcaaaacataccttgtaaacaagccctcgtaaacctgtgcaacacgatcttgaagtccaacaacaatcccaagttccttttctgcactcagaatcaagttaccttaatcaggtttctcacattgtagaagtcgagcatacagtttagagcagccgatacaatagcactcccgaaagaccagtatgcaatgtcacaatcatgctactatatcttgaatcaatgtttcaacaaaccaacgttcaaaatcccgagaacctcgagatctcgacacatttaaaacccgagatattgctgagatctcggaactctttgttcagacaaacacagttttttgtatatatttaagctcgttatttatttgtttttgtttttttttaactttaaagtgtgttaaacatagatactcaataaaaaacactaatgcaatgactaaaagatataattatgtttaaaacttatttcaatgtgacatagacatatgagatacaaatatcaaaaaatttggatgtacagtcaaacctgtctaaatgcacggccttgggacaagaaaaaaaatgtgcatttataaagggtgtgcgtttataaagtaaaggtgcataattatgtaatttagccaataaatactattacttggaaatagtgtttgtagttgtagagaatttattttggatattaattacatttaagagaaagtttaattcttgttttattattgtaatggacatggactctcttatagtattcattttcgtgaatgtgataaataattttatcttattttcttacttatagtgcaattataaagggaaaaatatatagttgggacaaaaaaatattgcacattacacagtgtgcaaggaaatcttcaatatacactgtcccaactatggaaccaacattttttgtgcgattatgaaggttgtgcatttatacagggtgcatttagacaggtttgactgtagtgtgttttgtatataaataatgaaaaaaaaatggagtttatttaaattttaaagataaaagttacaaaaccgaaaagaaaaatcaagagattagattaaaaaaaaaaacattacctttaaagatgaaaccaatttagtcaatgcaacgaagagaatataaagattgtgaagaattctttccaaattatcacagtcattataaatcatgcttcaaggatgaaaacccatttgaaatcgaagaatttggtggagaaacgagtttgatttggagattttagcaatagtagaaacctttataagtaatttttttttgtcccaacgaagaagatggattctcattgctttcgagtgtcggtattattgaaacaataaagttaaaatattacttcttagatgaaaaaaaggtttgcttgataagaattcgaaaatttgttttccagaaaatcaattttagtgaagtccttataaatatacacaaaaatcattcccacttaggtacacaatgtacctagcccagtcttttatattatagtattttgttaaaaagtcccacaaagattatatgggcatatatatgccacaccctctatatgattgcatggcatatatacatcgatataatgtagaaggaagaagactagtatggtctgtgtgtatacattgtgcctatccaatttcataatatatcaactacaaacatctaatcttgaactatattggtgtttgtaaatccacattaccaaaagacataattactaaataaatttctaatcacatggatcgaattcaattgcaataaagatattaaacatgagatgataagagaatgaaataaagaataaactagttgtgaaatagaattgaatcggataagatcgtgaaaaagatgaggttgaatgacgagattatcagaaggttccaaacgaacaatagcccaaaaattagcaagtttgaatgaaatcgtacgtccatagtaaacatcgcttggatttccaagaacaccaattcttgcatatgacttgtgcttgatcgtcgtcgtggctttgagtcttttttttttttttcctgtctattcaaacaaaattaattaattacatggaaattagtttgaaactgtgaatggtaattaaggaagttaattaaggtatgataaaaacaaaatgatacgactttcttaaaaatttctcttacgcagatacacctcaacattatttaattacaacgtctccaaatgtaatattagcataccccccaccgtgtgttaaatgggtcatgatatttgtaatgggctgatattgggccgggccatgatttgtgtaaatggaaaatggagttttctacagcataataaatggagtagataaactagtcttaaaaggttgctttgcttttagtagaaagtgttttctgcttttcattgctttatggagagaaataagaaaagaagctagaggacactttccatgagaacaaattccatagacaatcatacaaaccttttggagtaaaatagaatgcaactgaaaactttttggtaaaggtattcatagaatacaaccttataaaagttgtacaatagatcatagtttaaaacgccgatttcgagcgaaatttcgaattctggaaaaacggtatatgccgagatttttacactagaaaagaatttggaatttaagtattcacggatatttacatttctcaaatcccggcataattcgtgggatatccgcagatatccccgttattttaaactatgcaatagatttcaagaaataaaactttgtgagttcaaagcaaaaagattaaatgatagattgtcattgaagttggatcatctcaaacatgcacaagttttcagttctatcttgaatagatatgttgtcccttatgtaatcttgaaattcacatccatatgaaaaagttaaatgatcatcagctactaatatttctgaaagagacaaataaaattgacttgctaaaccctctccttcactacacatttcaccaccccaaagaaaaaaacactgaacataagagaggttcattcgttggctcttagaacactgaacacttttgtgtttagtagaattgtagatacacaacatgagatggaaacatcaacattttgtgccagaaaataataagaaacatgaattctctacagaacacaaataattaattaattaaaaaaagtgaaatttctgcagagaatttcacagtttgatagcctcaaactaatttctatgtaattaattaattatcattcacaatttcaaactaatttctatgtaattaattaattttgtttaaacagagagaaaaatagagaggaagaagaggactcagagc

SEQ ID NO: 14466 - DNA, 2317 bp, Aquilegia coerulea
  Intron number 8 from transcript AcoGoldSmith_v1.000689m (l ocus AcoGoldSmith_v1.000689m.g) derived from phytozome v7. 0 (chr-ID scaffold_15; pos 2700278 to 2702594 reverse stra nd)
cgtgttgttggtattattaaacgtaattggcaatcgtaagtaatctacacctagaacttcctggcaagctagttcaaagtgtttatattaggttgcttctgggattttttttaatcagtcttactactgaagcatattatctaatatgatatatcagtaagttaaagaaataaactaaggcaaactctaactacaaggtagaggtaccaagtatgtgaagtaaacatattatggactatggagaaccaactagcaatcactcacacaaagaaaatagatagtctatcaaagctgacaatatacatggcctcatgaggagtgggtctgagatcttcgtgggggtagaggatcatgtagtgaaaaactttaatgggaagtactaacttgtatttaacattcgtcctagtaaacactctcccattactgctaaatggacctatagtataccaaaaagaagcaaatttctttgtaacgaaggctgaaatacagaaaaatatctactgtaaaaattgcaggaattgagattgatgaaggccaatacacccctacaaattaattaataagttaagtatcaatgtgaagttactatgacattatgacactagtcacttaccaagttaccatgacaaccacattataaatgcactcgtcggatgttatccgtattcctactcacaagtttcatttctcattcattgtttgataacattctgtcattcttaagatgttgatattattttatttatttatttttttttttgtattactattatttattcctatccccacaagcgcatttcaaatcaagattttaatttttttagcaggaagcacactgaatgtatgtgctctgatgttaatcatagtaaattcatctataagagtttggacaatgtaatgagcaagagataaagtagctgacctcctttcatattcttagaggaattaatgtgcgcttgtaatgaattcgaattccaacagttttaatatgtgccctcttttaaaaggtcttgcagcaagcgtgagaggcaatctagatatcgagttgccattgatgccaatttggaaaaaatggtcatcaagcactcacttctctactaaaagagttgactttataacgataaaagcttttgatgtactcttcttctaaaatttcgttatacgtttagttatttagaaatggatagtggcaagcagtggcggagccaggaatttagctgacctggggcactctaagagataatactagctaataagtttcttcttaatatgagcagatgccagccgagcccagctggtaatacctctgggcgatgataccagaggtctagggttcgatcccagacagtgcatctttgagttactgatctcattaaaacaggcttgccaatcaaaaaaaaaaaaaggtttcttaatatgagtataacgaaaaaacaaagctaagcattttatttttcaggatctttaccgtccattttctttacccatattttgaaaatgtttcatatttgctcattgtcaatagcatcgaaagcattattttctatatacgtaactaatcaagcattttactgtctttcatttcgacaattagtgttgaagatttgaagagtggaactgtggaaggtgattagtgatttgatgaataaatgaggtagtaactaccatcacaatacataggaaaaacgtaactaaatcaattggaacaaaataacactgacaaattaggggtttttaacaaaattaaaaaaaaataaacgttaaccaaatttaaaaataaatcaaaattaaaacagttcaagaaagtgacactcggtctccccaaatggttgagaaagtttattttgattattaacttaaataattgatcgactagtagaaaaagaatggatgaaaaaaaatccccaagctttcttttggttcaagttagcaccgtctaaaacaacctaaccacaataaaggaaaataagagttgagtagttactacttactagctagttaggagctgatttgttttagtgggctgtgtaagagaaatttcaaacagtcgacaaaaccttcttgaatacaataaaccagttgtactgatttactaatgtcagattgcaataagacatagtcattgaacaaagggttaaaaaaaaaattataaaaaatctttgagaaaatcacctggggcacgtgccccggttaacttacatgtagctccgccactggtggcaagaaattctttgtttatttcccctgttacgagagccaatggtatcttacttatatttcatttcatttttgcagttattgtggttccttagagcca

SEQ ID NO: 14467 - DNA, 3569 bp, Aquilegia coerulea
  Intron number 7 from transcript AcoGoldSmith_v1.009504m (l ocus AcoGoldSmith_v1.009504m.g) derived from phytozome v7. 0 (chr-ID scaffold_21; pos 1780136 to 1783704 reverse stra nd)
aacagaagaacgaggatcctgcagcagtcacacaggtcagttcattcatatggtgttaatccattttttgtttcttctttccacgattgatatactttagcattgtataacacatcaaagggagaatgaataggcatcaggcatctacatgaaaaagatgagacattcccactaggttgggagcaatgtttaaaacggggaggcgtaagccataaggtgttatggcgcaagctatttgtgcacttattttctttaattaaataaatatttaaaaatatataacatcaaaataattcatacaaatcacaaaattattgataatgtcataaactcataattcaaacatagattcaaaaggctacataatgtcataaactcatattcaaaccacaacatgataattaactaattacgactttttgaggttcttcaaagttctaacttaattaataatcagcccttaagttgttagggacttggggtttgtttgattcagcaatcagcctaagttgcaaccttttaatccaaaccatccatatccgaaaaacatgaagtaagggtttaaaagcaaaagcacaaatagcgtgagttttttataaatagcgtaaatagcgtgagctcttgcccaaaagtgttgatggcagcccaatagcgcaagttttttgtgcaccaggcttttactagtaagccttaaggcgtttttgggtcaaaacgccttaaggcgagccttaaaacgagcttttgcacgcctttttaaacactggttgggagccccttagcccacatccttcgtcattgcactgcatgctactcattcaaggaacgatgttagtttaagaacacctctgtattacaaaaatgaggaatctggatctccacctggcttaatgaacagactttagaatccaaactgaacacaaaacacgaagcttaggtcattgaaagcaactgtgaggaatggacacacacgtcatagttttgtggggaaatgtttagtttcatcatttaatatggacaatcaccataatatgttgtttggccaaaaacccaaaaaatttaaaagtggttcaccgagatttcattgttttccctccaaattgaagactatttttgtccccaaagcttaagtttgtctggtaatctctagcgactataccacactgtggctctgtgccatccttaactggttttctcaaagccacatcacaccattctgcgttccttgtggcttgttcattctattgtgtcttctcattctgtgttttttattaagaagggagggggttgttgatgaagaatattatattgtaatcaaatcaacatcgcatttgcagctccctgtagcctataaagggtgctatgacatatacatgatatagctaaaacaaacactgtagtataatttgctaattatgaaatttactttggagacaatccagaagccagtcacaagacccaatgaatagtatctaggtggatatctccccctggtagaaattaagatccccaaagaaccatatatatgtatcctttgactgataggggtgggccattggatgaaaaagaaatcttctagatttcagtgaagatagggaagcctagtaaaaggaatccagggatcttctgtttggggtgtgtattccctctcctcgagatatcattaaatccagttaaccttttcttcagaggagattatatgaagtcattatttattgaagatataaaattattgagctcttttcagcctagaagcaagggcatatgctatgctaatatagttaaccacgtagtaataaacggaatgccatagaagttgaaaatacagagcgaacgattcacaaggttagtcatacaggaaatttataaaagaagctatatttgtgggcatgttcagttgtggggacttccaggaaaggggagaaagagtggtcataaggttagagtcttgatttacttaactgtaaggagcttagagatgagaggtccttttttaaaaaggtgccacaatatagaggttttattgataattttgattatgaaattggaacaaagggatcttgcactcatttaattaactggggtcacaccatcactcctagatcattctaacttggctttcttcctacataggtggatgcttaatctcttgttttctagtcgattattttttcagtctaaaaaaattccaattccattttcttttgacattagtgatttcaactccagaggaaaatgcgtcagataccagtcgatccacaccaaacattagccattatagtgaattttataaaatgagctcctgtaactgaaatgtaggtcagatcgatatttgtcgtctacactccatacgttctaagtgcctaggaatttttgatgaattcaaccaatcctttactgccttgtttgtcagctgagtctggatcctacacgtggctaataaacaataattcaatattctattgttttcacgatgtcataagactccaagcagttgaagactgaaagagtgcaacttttcttggcacagagacaccaattttttcaacaagcaccggaaaatttgctaattcatcaaatttattagttctaataagtaatagcagagaagacttaggctataactaaacagaaaaaagaaaaaaaaaaaaataatgggtcgatttggatttctgatttttgaacttgttaaacgtagctgacgggttttgaacacattattcttgtacagttgtacctctctaatttaatgcccttggtggcatacaaaattattaattagtggggatattaattttttcatgcatgtatatgtggggatcaaatgtcctatttcccaatgaacttaggagacatctcccatacaaattgaattatgatggcacatttatctaatgaaaaattaaatgtacaattaaaacattacaaaattcagtaatgtagtaattaccttagataaatggttctcaaagcaatgtagtaattctactaattaatattttctatatagttggttctatgttttgtattaattaatagatagtagaaatattaaattaaacctatagaacgcggtcggttccatgaaattttattaaatgttggaggttattaattattggggtattaatttagggaggtacaactgtatttaaactttttgttgataaaatttggttttgattttaactctttttactcgaactcctcattacaaggatgggtttagctgcaatttttagagaaacactgtttttggtgactatgtttcaaagtactacttgtgtatatcaagaatgtggctatataacattgatctgaatacctagagagagacttcgatatagtaacaatgtggagttagatgtcattatcattaagagtctaaaccctagagaaatcaaattcttggttcttgttttggaagcttgagtcttttaagtcttcgtttatcaatgtcttcattgcatcgcatctacaaatgaatttgaatttctttttcgcccatgtttgaagggaactttttttatctgtttattcatctttttttttttgaaatatttcaggagtag

SEQ ID NO: 14468 - DNA, 1061 bp, Aquilegia coerulea
  Intron number 1 from transcript AcoGoldSmith_v1.016777m (l ocus AcoGoldSmith_v1.016777m.g) derived from phytozome v7. 0 (chr-ID scaffold_164; pos 46982 to 48042)
aggttatccaggcaagtatattagcttgattataaatatatatatatatatatatatattaactagtacgataatgcatgtgtttgacattataattttccctcgttttatacagacacacccagaagctaaaaagtttaggtatgcgcctcttgaagacattgatacattgaaggtaatgtttgagaccactcttgcaaaaggggaagattcatggaccccacgatcatcgcagcctcgacccacaaatcaaaatcctgagaacgtggttatagaggatggggaacaactggatagtaacatacctattgggacacaagatgcttacttttcaaatgttattattgaagatttgactaatactgaggttatgaataatgagaagggaaccactcacagtgttgagaacatatgttctcgtccagagcagaagcgacgcaagagattaggtggtgataatgaagcaagaaaacaagttgaaaagctcattgatattatcagtgaacatatcaatgaggaaaaggctagcagtggaccattttttgcccaagtagtagaagttttaaaggatttgaagaatttgggggttataaccagttctacttacaaccaggctctagtgaagttttgtaagctaccagaattgaagaaagctttcatggaggcagagaatgaagcggaaaaagttcaacttttggacattattttaagcgattagagaaggagttaggatcttaaatacatgaatttattttttggatttcgattagtatgtttttgagattagaaaaaactaataaataaataaaactcgtattagtatgtgttcgaattcaatatgttttggtattttaattagtatgaattttgatgattatatactgttggaattttgtttagatggtttggaagttatatttgttttccccttattattctttgattttattcctattttaaagtgttcttgtatgttttagaacaaagatatttgcattacatttatttgtagattcatattaatttaatttttttttatcttttcttggtttttagttata

SEQ ID NO: 14469 - DNA, 2687 bp, Aquilegia coerulea
  Intron number 11 from transcript AcoGoldSmith_v1.020284m ( locus AcoGoldSmith_v1.020284m.g) derived from phytozome v7 .0 (chr-ID scaffold_46; pos 366411 to 369097)
ttgattctagctctgatctgcaagtacaggtgatagttctgaaggaaaatctttttttcctgaactttattgctttattgagtgcatttagacaaagttactcatgtgatgaaagttatttaatgcaataagtaaaagactggtgtcctctttgatttgtctcatacataaaacatcatttagtcacttttcctgaaatgaaagttaattgttatccatttgttgatctgttggcggcccattacatgtgcgtagtttaccgcattttagttttgagagaaatctctttcctgcccttccacgatatcttaatcaactatcatattttccctacgagatttaatctgacctccacctttaaacatctcttttgctatagccctgaatattgttttacttagcagtccccttatttttgttattggtagttgaccgtcggttgataacgaagacaattccatgctaacaagatatatcagacatccacatggaccaacattatagcttatctggaacgtcatatttgtgacgcgtgtcgtataataccaagtacagtacggaaatcaaccctatccagtcactctaatctaagctcgaggaaagacctttctctcatttggtggtgggaggagttacaaagagtgcggaggtaagatatacagtgttctacttctggtatagggtgttgcaaaagatggggtttatggaggaatgaggatgctacaggaaaatggtggtttggatggagaggaaggagatggcgtggatatactagcacacgtcagcatagaggatggtggatacagggagtaatggtgaccgatcttgtgggtcaagtggcttggtaagagagactgctcaatggtaggattttgaaagttataatatggagatcaagcattgtggtacaggcgcttctgggcaatgttacctgtttttttgtagaccagagggagaaacaaatgaaatataataataactaatgtttttattccataatcagacatagtttatgacatatcagaatctaaaactgacggcgaacggtagtttagaagaaggagaatatgaattctcaaagggagatttagaagaacgggaggaaattgattgacgaaggagaaaatattgaggaaggatattgagaagaaaataattaagggagataataggttgattggaaaatttgtattcaatattgattttctattacaatgacaatggtccgacttctagaaacattaaaccactaaacctaactaaacatggactcaaacacataattctagaataatctaaataaatcctaaacaataatttgaaaaaaaaaacaaaaactaaatatactacttgtcctacatcaaaaacttctttcttgtttgaactcattagtgttagatcagcaccctaatttctattccttctctacacaatggcacacaattcagcaagatttgcgtgattgtatgtaatgcagattgaaatgccagaaaacatgttcgaaaacgtgtatgttccatgcgtatccaaattacaaatcactagtgtgggcacaatttctggtagcagtgcatctgacagaggaggacaaatgggaagtcgaggactaaaattgtaggatattatcatctacgggcgtgtttctgtaacattgacgtcattttagtgtttttgggaggcctttttgggtgtaactagtttgaggttttttggagagttagctttttcctgattctttgtatctattcttcttgatgtaattagttaattatgtcaatgaatacctttaagtatggtacaatcaataaaaacgatagaaaaagggatatctcaaattgtaagactcactctaaattcatttaaaaacaacctaaaaccacttttggccaattgccctatttatacaaattattttttggagccttaggattctaataggaaatataataataaagaatagaacttctaaaaaccttaataatttttgtatgctctcgcatctgattatctttcatatcatttgatttatgttgcaaatctaatcccaagttatgtaagatacaattggatggctggataatatattaggcaattcttatgtttttctaatcagtttttgacttgcattattaggttttaaaaatcaggctcagagtgtgattttatgtttctattgaagagccctagttaaaagctcgtgtaattgatgaagaggccagttcattcatagatagttctgtgtaaaggaaatccttttagctcaatggatatgaaagtttcattattaatatcttttttctaattcattaaaaaccctaatattcatatgcttgcgaaatatttgcttcaccccctctctggtctgttgtgatgatggatctgaatcatatgggtacttctatgttttaactagctctttgcatatatgtaaaagaactaactcaaggcttttcaccaaaaagacaatcatgcgaagcaccctcgttgataattatactaccttaaactgccttagtatacactatgtagtctacataacattttggaacttggaaggacattttccatgccttgactcctgactaggtgaaaagttcaacctttttctttactattctttcatgttcttacagtggaacaaataattttcaggttgcgtggttaaaagttgagttgagcagattgtt

SEQ ID NO: 14470 - DNA, 2423 bp, Aquilegia coerulea
  Intron number 3 from transcript AcoGoldSmith_v1.000320m (l ocus AcoGoldSmith_v1.000320m.g) derived from phytozome v7. 0 (chr-ID scaffold_15; pos 657858 to 660280 reverse strand )
ggacaattaccaggtaactttttcctccattatttgattggcagacaaaatctgtgaaaattgttctacttctgtttatgagttggatgataatgtttggtcaaaatatgtaccatgcatatgttcacacaccttgtagtgttttccttgaggttcaaaagtttggatttacaccctattgatgttcatcaacctttattgcctgctgggttatgccttggagggaactctatattgtaggaatattatataattattaccaaagataagtcataatgttagacacatgaaacaattaattagtagtgaggttaatgtatgaagtcaatacaattttttgtatttataaaagaaacttgttgagtttcaagtcttgcaaggggcattccttgggatcctgtagcctaactagccagcttaatattcacgtgttgaacctgaaggtatttgaatttagtataggataaatgcgatgatgatggggtggagttatctaggtgaagttacactgcctcttccacttccgtgctggaggaaatgggattcaaacctgcgggtggggtggggggtggggagttatctaggtgaagttacgtatatcattgtgcttcgagtttatctaatcatttcttcattcaaatattattatgtttgttcggtaagcccaaatcttggagaataaccatttcaacgatgatgcatctcaaagttaataaaagagttgcgacagtcggattctttgtgacttaagatctctacttatattcttagtgttttaagcattttagaccttgtatagatgagatgaatttaatttccatcttatatgatggcagaaataaattgagaaaagtacgatgaaaggaagactcggagattattcttatgaacaaatggtgaatgagggttggggaggattctttactcattgtgttcttatgaagccattgtggataattttgtgagtgagcctagaagatccaacctccgcaccctctttcttccacatttaaaagtgattaaagatacgaactatacgcattttgagcttgcttgcttatgtcatggcacttttaactttggatgaaagagggtgtagaggtctagatctctatggacgggtgctgatgatcggggtccttcatgaatattgcaagtacttacactatcttgaaggggatcataatggcattggtgtcacaagagctagggctcacttccttttagccaaagtatcctggatgtgatacatcatcctgaagaaagcattgaaggtgggtccgtgggtgtacagctaacattttttcatctgctggttgggggtcataggaggccatccatagaattgtgtggtagtaggactttgcgacgtgttagtttgagctttatagactctttgtgtcactgatgtgtagggtcaagtgtggttttagatataaaaggtattatctgaatatccttttagttttagtttatacacctcgaacgggctttcgtacaagctcaaagctcaggcaaatggaaacttgacccttgcttcttttgactttttatttaggtagtttaggtaaaattacatttattataacttccattacacattctcttctacttcaataaatagtgttataattattttattctttattcctatcatcataagggaggtaatcattccacaacattttataccacaattaggaaagacccacaagccagtaagaaacctgatgtttttcaaattcagttttaatgcctaaaggtgaatgccccagtgaaaccttttcatcgaagtttcgaagcatagtttttaccatcaaatcattcaaactgagtaataacatagggatttgctaatcagtccagatattggggtttatgcttcaaagatgacgatgatgaaaaatagacagtagattatgaggtggtagattgttctctacatctatctggatattgttctctacatatgtagcatagttggtcctgccagaaacaccttcttggtggattgcattctcattgaacggtgtctaggaatttgggtatcccgtcttctgtcaggattttgacacatccttgggttagcttagaggtgtaattgaccagcatctatctgtatgtgtgcttgagtgcttgaccatcttgcaagagtgtttttcaaggccattatgctagtggaagttttttatttatttgtatagaacccttattttgtgtcgctggacagaaagacataggagtgtttttgagacaatcatattgattattgaagataatggtgcaggtttttatatagttccttgacatttttttcttggtgttatctttgagagatcaatggtatcttcattatgttggttttttaactatctgaaattgactttggtgatttctcttgttttgcatcttataaagatccg

SEQ ID NO: 14471 - DNA, 1635 bp, Aquilegia coerulea
  Intron number 13 from transcript AcoGoldSmith_v1.004367m ( locus AcoGoldSmith_v1.004367m.g) derived from phytozome v7 .0 (chr-ID scaffold_68; pos 428889 to 430523 reverse stran d)
gtctattaggtaacacttcttctaataaatatcttcttgtatgtgtttgcaagttttgatatttctgcaatatatgaagctgtgtctttgtatgttgatgccgtttgatactttgatgtcaattttgccttctcatttttcgttattgccgtcgtttttttaataacccaagtcctcttccgtcattcttctgcaagtgtttccatgctaacacttcattagtccactaatgatttgatgtagtacttaccagcaatttcatattagcaatttggttataacgacatgttcaatgatattatttatatcattatctattctgtagtttatcacccaaaatttttcactaccaaagaagacagtatagtatcaagaaacgataacaggaaaaaaaataacaagacgactttgtaagcctattggtttggagggtgttacagggtgcttgtgttttcgctcacaaatagagttttaatagcataaaaatatgaagtcatattaccaagagggaagttttttgttgttagaagacgaaaaaagtaacattttttaaccgttacaagtgccgatatatttaacttacctatttaggttatgtatgcttggtttctaggacttggatttcttcatggttagtcaatatcttctatcttccaggcttgctttctgctccattttctcgatgtggagtatgatcctgttcatggttagtcaatatcttctatcttccaggcttgctttctgctccattttctcgatgtggagtatgatcctgttccatattctgtggggtctttcattggaggaagaccataagattattatcaattcttgttgacaatctcttctctccctttccttctcttttctataggacaatttatatcagtcacccttacgacactagatatgtttttcttagaaatttaattttacaaaaacagggatgttctctcaagaaattttatttgggcatcgttattttgatattttcttcgttacacagcataactgaaaaaattacaaacaaatgaggactatgaacaaactggacatgacatagccaattatggttgaatagttataacttttaagacgccaggctaattaactttggagagcacagttgctgcaacgagtggatttggggtgaagtatcataatgtaaattaaggaattgaagtgggtttcaaggatcaataatagttagcgaaaataccgatgttccactttagttagacttggtttgactgatatggtgggctttctttgtatttgtacttgatataaatatattgaataatctgtaattgtttctgtaagaaaccgttctgaatggaaacatggtaaatgcctcctaataggcattatgagtttgtagaaaacaatccattccttccattcagaaggcaaataatttgtgcttctagaaatggttctcttattttattttcttcaataattttgatgaaccttgctatactgattatgtgtcgtatttaatagtttgtcttcttgatttgcaaatattcagaataagctactctagttcatataaagtgagtgagtctaaccaaactttccggtttctctttctttttgcagaagaattcaaactcaatattgagtgcaatc

SEQ ID NO: 14472 - DNA, 1207 bp, Aquilegia coerulea
  Intron number 1 from transcript AcoGoldSmith_v1.001249m (l ocus AcoGoldSmith_v1.001250m.g) derived from phytozome v7. 0 (chr-ID scaffold_4; pos 7529790 to 7530996 reverse stran d)
agtctcccgattctctagctccgaagaagaagaaggttagtagtgttagctaacttcttagctgtttttctcaccttgtgtttcggtttaacgcaagttcttcttcttgttttaacgaatcaatctatctttatttacattctcttcttttcaaacaaattcaatttcttcaaacattaacaacaacaacaacaacagtacttagttcttcttcttattgatatagatctagatctcattttcactattttcttctcattttactgtaaatttttactggtgagtttgtttgatttgctcaatttgaatatatttctataattaagaactacatttttggaatacttttgaatcagtttgcttcgatctttgagtttgaatttgatttcattcagatctgattcagatctttcggttttgttgatttttctttactgtgttgaattgttcattttcaaactcgtgttttttatttggttttctattgccattgccactataactgttcgaattcagatctggtatagttttgaatggttatgtttctcaattattgtgttaaagcatttttttttcacaagatctagtgttttagtggaatttgtagatcaatgttatggttttaagtaaatctgattataaatcaattcataaagtgtcagttgcagttcacatgtaaaatctgaagagtattaaatatggagattgtgatatttatgttagaatcctgtttaaatcaacctcttttattccatgatttgaggaataattttctaacaaacttcaacagaaaaggcacaattttgaattcaaattagaataaatactgtgacttaggttttattcttcccataggtttttttttatatgtgaagtatttgtcaagaaagaaaaccaaaaagttttttaattatatagaaagcaagtcgatcacacatgtcggttgctttaaggtattctgcggtattctgcttctttcaaaaattaaaatttgtattttacctaaagtacaaaattgtatttttttattgtgaaatgttttacttaatgacaaatatttgtggtcgaaactcgaaagcactgtctgtccagttttaaagctaattttctattatatgcgccaatgaaccttacattcttcttaagttacagtatctggattctttaatcattttttaattatagtattatttggtgaatcagaaaa

SEQ ID NO: 14473 - DNA, 1367 bp, Aquilegia coerulea
  Intron number 1 from transcript AcoGoldSmith_v1.010598m (l ocus AcoGoldSmith_v1.010598m.g) derived from phytozome v7. 0 (chr-ID scaffold_13; pos 5967319 to 5968685)
ttcgtaaccctaacagacaagttacccgatcagaggtaattttgctgaattgtttttcgtaatttacttcaattacttctttcaattgatacaaatctctaggtagatggattgttttatgtgttttatcactttcactctgttggattgtttgtttgttttatagatttgttgtgatgcgaatggaattaggttaaatttggggtggattttgaaattttagtgtaaagttatttttgttgaaatttttgtgcattataatgtcaagatggagtttttaaaacacagcactgattgacagaactaattttcggatagtttggttgatatgaatgaagccttggactcactcactttggctggttttatgactcttggttggtggtcactatggtatagagtaagaaccatacgtaagttactaactgaatcaagcatcggagccacgtgtaaacagtaaaccataatctcactgagacacgtgtaaacagtaaaccataatctcactgagacgctgactaccaaaaatactgaacataaattgtccctactagtaaaacaaagtttagaactgggtttttgttctaaactagagtggggtagaaacgtgttcacttgcctcaacttcatagagaggcgactgagaacatggaagaaagtaaaaagatcattttctcagctattttaagtaagaaaactttgattattcgattagttgttatcttggttacttatgttatggtcattcaactttggcctttggaagttatggattttactgcaagctgttacttgggatgttttaggcaataacacacttccatgtttgttcttgctatcactactcaatcaaggacatggtgactgtactttatatggaacagtttcttggagtcaatgttaacagttgtacaagagctggtagtgaatagagttgtgcagtcctgaccgcctgagtggtatcatactgtcatatatattcagacaagatattatataatatacgcctcctagcccttgacgcgaagttgatatttgcaacagattgaagtatattacgagatatgacacccagtttaaaggctgcagttattgtagctgcatggtattcataattctgtgcatgtggagttattgcatgtgtgaagcatgtaaagtgggtctgagtgaagtttgtttagtagttgttgtcttgtatcataattgtcaaatgcattggtactctttctcttattgtagtattcttgtcttttacttgctatatcctttaaaaatgaaaattctattattttgtatttctagttttatttacctttttgttctttttgtcagaatatcagagctgtgttggtgcaatcaacctgcga

SEQ ID NO: 14474 - DNA, 746 bp, Aquilegia coerulea
  Intron number 4 from transcript AcoGoldSmith_v1.020363m (l ocus AcoGoldSmith_v1.020363m.g) derived from phytozome v7. 0 (chr-ID scaffold_7; pos 2666428 to 2667173 reverse stran d)
gtgatacgaacagatataggtgggatttcttgatgaatttatcatgttacttaaaggcacttcttgttttctttctttctttctttctatttttccattttttgtagtgtaaaatgcatagtgacagtattgatatagaagaatatatccatatctaatatagtgactatgatgctatgtctttccttgactcctaaggtcactactgattgtcgggttgctgttagcttcatgctctgttattacatttatattctgaatttcacacatgcacacttttatcaatgttgacatgggtgtaatactcagaatccagagtggtgttagtttgctatatctgttttatcttagattaagaaatctggtgcaaccgtctgtataggtaatttatatttgtttggtgcaagcaataagaaaaaagataatgaatttaaagtgatactctccatttgatttagtctagaagtatggattgtgttaattgttatacaggacgtgggtacaccattaagcaggtgtataaagctaggctgtaaacccatctttaacaaaaggagaaaaaaatgcatcttttgggaaacgacctcgcatactttccatattctgttctcttctgatactagtctgaaattggtttggttggcccagtagttttcttttaattatttattgttgaatgctttactgtgacgtcacatcttggttcctatgaaaatatatggatcttatttgaattgttttgcagg

SEQ ID NO: 14475 - DNA, 1911 bp, Aquilegia coerulea
  Intron number 9 from transcript AcoGoldSmith_v1.000704m (l ocus AcoGoldSmith_v1.000704m.g) derived from phytozome v7. 0 (chr-ID scaffold_7; pos 2823210 to 2825120)
gtgggcttgtttgggcacgccagttgggtggtgaggtaaattcagacatttattgttaagtctgtaatgttcatatcatatatcaaagtttttgtgtactggccatcaaaattcagacgtccatgttttgattattttatgaagcgttatttaattagttgaatttaattaaacatgggaaatatcatatttcattgttattgtaccacattttagtagcttacatttgtggatgcataggatcataaaactggcaaacatatactcttttcattttctctaggtctgctcttcattgcacttcctgcactgatgattgatgagtatgaataaaagagaacgaaaaacccgccattgacttgtactcaaagtagtcagcagatgcttagaaaccgacttgatttaattatatcaatgtctttaacacttgggtgtgtgatggtgagtgacacactattttttttttttttatttttgaaactttagtatcttggttatgcatcttccaaatcagttaatcacacagataagcatttatgcctatttcttgtgaatttaagctacatgggattcaggatacagttttgcagtgacattttagtaatttaagtatgttcttggcacatgtaattttatgaacttacataaaaaaaccaaatcgaaatccatatcctgtacttgaggcctcttaatttataactcgttgatataatattatcttgacttttttgtagtttacagagaacagagtaggagtagatatgggcttcttaatttatgctctagtatttgtaagatatcagaagttagagagaggaagtatgcctgtgtggcattagtgttgtaccaagtaaggccatattgtaatcatttatgaatttatagaattcacctggtggctaggtgtttcattttgtgcaaaagggatcctctttgcgtgtaaaggaatagaaaaattatatccatcaccttttctcttcccatgtttctaaaaatatttagggatgctttttgggatctatgtgcgagggggaagataagattttaccgcatctctttttttctcgtgtcaatttagaagtattcagggaagtgttctgggatcttttccgcaccaggaccagcattggtataccagtctctcatgtgtatttgtaactcttctggactgcatgcctgctgccaaagaggcgttaactttttaagtatgtccacattgctattcctttggagttttgggaagagaggaatgagggtgtcttcgattccaagatactcttttcaaaatgaaaacattatagttaacataaaaaattgctattttcttgggcttggggcccagtgattgaagacttgggacattgtagttcattcttgattgggagtttgggactcaataatttttgcaattttctttttggttcttatttaaaacaccttgtgtttgggctcccgagcacctctgtcttgtactttctactagctttttatattatgaaaatatctatcagtataagttgatgttaggtattgtcttcccactagttctagtctattctttggatatcttcatcacacatattcgctttgtacttttaaagaccctgttatttgcttttgtcttcttaagttgggaacatgctcaattcgattaggaggccatgtacatttatgatttatctgtgttgttaaactcattctgttgatgcttggtggtaggatagattgtcaactatgtgctgtttggaagggcctggatagatgtgtggataaccatttcattgcatgactgtctcaattattcagccactaatggttttagtctacttagctgtggttcttcttcatcatctttattttttatgttgtgaaccagggctccaagactcagaagtggaaattgatagttcg

SEQ ID NO: 14476 - DNA, 3291 bp, Aquilegia coerulea
  Intron number 1 from transcript AcoGoldSmith_v1.000775m (l ocus AcoGoldSmith_v1.000775m.g) derived from phytozome v7. 0 (chr-ID scaffold_1; pos 9725762 to 9729052)
ataacaaaattaaggtacatggcattatattgaacattaattaattcctttgtatgttttggtttgcatattgtccatgctctcataacttttatgtgacctggttttgttgggtcaactgctctttcttgtttaatatatcctcaagtattatagatatctaagacatattttcttatatactttataatgctgaatttgaacattgctcttagtagttacatcataaaccaaagttaaggggcctttcacttccagaaatttactgttttctgcaaatactgtacagtataacatagagtaatatattatttgtactagctattgttttcaattgtgttggatgcttgactgaaactgcaataatgacattgacatttttgacaattctctacaacaataggcctcaaaaccaaattttggtatactataataagttgtatttatatgcaactgcttatacatatctactttaactctatcttggcaaaccattttttgttcattgatactggttggtgagtggtttggttgtattgaaatctgacacagatagtgattctatgttgtcactcccagattactagtcagtaactatttaaattttaaagtgttacggtttgaaatgggaaaagaccaaaagggtagtatgcgagatctagtcctacttctaatcatgattccattttacagaatttttttatttgcaaatattgcataagctgtttaacatgtcgaatggaggtaagtttataggtgcatacccggattatataatataccagaaggcaagaatcaagtaaagctcaaagcttcagtccttgattgttgaatctttacctgattcaaacctcgatcgacacatcttaagatccatcaagactcagtgccattgttgttgccattcaaactgtacatctaatcccaatcactgtggatacgactgtaaactgcataccaatcagtgacttagtacttaggcatttagctcagtcgctaccttaggtgcttgaggtgagcctagagcctagcacaccctccctttatgaaactgaatgttgaatttccccaattttctcttacatatactaatcatgtaatatagagcataagttgtgtcaacaaagttgacaaacaaaacattagcagacacattcaaccttcatgatttgaattcagcaaaacttataatcattgtcaagactcttactacttagataatgagaagaagcaggggcgagagaggagtagagaagagaatatatctctgcaatcagtttatttaaaccctagattttttcttgagcctatcaaatatatcgggttaatgggttgtcggtaaatatatgtaaaagctggactaacattaaacacctaaaatttgacccagctcctagactcatgcttgagcccagtgcaaggctcactgaggcactcgcctaggcgatataaagagacaaataacctaatagacctgagcaatgcttacaactaagcattttacctcggttttagtctagactcttagcctaggcgcacttttgactgcatagagtacgtacacaagatctttgaataattagtttacaagtaatcattgtggatctctctctctcacacacacgcgcgtgcgcacgattttaatattttttgtcagtccattttggtttgtcactgttaaggtgagtctttctctccccatattttttgttccttaccgttgctagcaagagataatggcttaacctagtttggatgtcttaagtttcaaaaggcttggcctttctctgcccaatgcattttttcttgctcctttgcaaaaattaaatcataaacaagggagggttggaaaaattaattgagaatagttaggacttttattttaaaatccttaacatactaatccctgtaaactgtaccgtgtggtgagatgaatgcaagactgattcaatttgcaaagtccataaaaatgtgctcatgtgcaattaaatttttattaaaagccttttggaaataacatgctttatgaattccggcaaagtaaacacatcttgatcctaggtcatacaaatccaaggtctttctccaattgtcgtatcttttctcgggtttctattttaaattataaccatagataaaattaatgaaaaatattcagaaagatatctaaatcttaaaagagctcgtttatacagaagtgagagttgggaaatatcaattgaaaacagtgcactttaatattgaactgtctcatgattaagccttctatgacaacattgaggcatctggcaagatttgtccaagatgaacccaatctgttcttagtttggtttggcagaatttgtttaagtatgtgttcttaaagggattttatggatattagttacataagagcacaattgtatgcaaaaccaaattttgactcaatacttggaaagggaagaggttttctgcattggttttttacataaggtgttctcattggtttttcattgggaatggcaataaaagacgaggaaacttacgaaatagttgctattatgagaaccttagaaacaaaaacttctgttgattgaaatgatagatggacatagaatggaaccagagacattttgaaatctttggggcatttaataagaatggaaccccagacattttttaatgagagtcgcaaaatattgcacataccatccctgacatcaaagggttgttattcgtttggtccaagagctgtcacgactactgggatgttccatttgcttctttcacttttttttgggatacttatagggccttggtatcttgtatagttagtccttgttttttattagtatgttgtttcttgactaggcatctcatcccttggcatttttgtatatttgcttctcttatagatatattgattgtttatttttatataattaaaatagaacttaaaatctgtctttatcaaattgtgctcttgtatgcatgatgaaaatgtttgctatattcaatgttttacttatcaatgaaaaagaagcgcacatttctatcagatcatggatcataattaactcctacttttcttttggtcagaacttgaaagcaaatcaacacctttaggtatagtataacctatgtgcatacattttcagtgctctaatgagtctttctagtatagttgaatctagaactgcttcatggatctgtagtttaatggatagccgctacctttgctgatttcattagttcagtatttttgcttccattactttatacatataactaactcatttggttaccacaggt

SEQ ID NO: 14477 - DNA, 1947 bp, Aquilegia coerulea
  Intron number 2 from transcript AcoGoldSmith_v1.008947m (l ocus AcoGoldSmith_v1.008947m.g) derived from phytozome v7. 0 (chr-ID scaffold_26; pos 633997 to 635943)
cagtgggtttgttgtttatttggtcactagatttggtaagtgttttgaactcgttatatgctacttatttacgccactttcttagttaatcactcattgttattctttgcaataagatatgtgccattacatctttgccaagttttgaagtaagccgtgctaaattagacaggttaaataaatgccactgctgtatataattactcatacgaagtacggaagtagtgtagtctcaaaccgagtttgtttgtattaaaattgggaggtttaggtaattaggttagatttggtagctgtacattgtgtgaaattggataaatatatgttcaaacatatcttccttttatgactactttcagtttaatttggaggagcatgctcttcttggtagataccagctttgaagttcttaaaactcgtgtcttttgtattgatagtgacctggttcatgcacttacacattctaatttctgccgaaatgcttataatatttatgaaaaattgtttgtaatataaagcatataaacgatatacggagtggtcttgttgaaaaagaaacagacgcacattttattcataacgagaatacttacatggtacgcaacaccgatagtacagtacacagtacacactgaaggggaaaataaagaaaaactagcagacagaggtgcaccgcttctagcactctagccacgggcatattctacaggggtgtactatgtctgctttctccatcactagaaatcttaaatacgagaggttttgtaccacgccggcaggggtgcgccgcttctaagcccaaatcaatgtaacacaaaaaagacgagaagtgagaattaatgacgaccttgcttatcctacgaagtcacaacgtcagaaaccataaaatatgtagaagaagaatatatacctgatgtaggattaactatgcagcgcgaactggctggacaattgtgaagaagaagaagaagcacaatgatcatcaaggtcgccatttacttggactgaaagatattcattgtagtgcacttggatctaggaacttaatacaaccaaatcactgttgttatacttagtggaggcctattgtcttcctatatatatgtggtgattggtgagattaggtgaaatcaatgtgtttcatctaacttgctttcaccgtaagtctgtaacaaagtttgggtagataggttcgactttcagaaatcagaatggacgagcaggcacctcacctgagggcccccaattgtaagagaagaagatagaagagagtcagagacaacactttgaacttcactcttactgacttatttgagtaattctacagactatcttgaacaacttttgggacaactgcttatgtggttgaacttcactcttattactgacttgtttgagttaaacaagtgtagtcaatctacactgactactctcctgagttttcaaaccaaaactacattaggacagttcctctcacttcccaaaatatatctccctttcttcccaattggactctcttccttctcaaatcccacactattttttgtaatataaagcaatctaacaatatgcatcaaaattccaaatatctattgcttatgataaagcttataaacgaaatatggagtggtcttgttcagaaaaaaaaaacaaaaacaacaacaactactttactacatataccatatgtcagctgcgatttaaagttagtctctttcgattttataactgcattaagcggtttcttatgcaccttccatcccaagcttataaaaatccaaaaaagaatgggtgcagaaacacagtcacactcatcttaacgctcgaatcaacaataatgtgtatagtttttatagctaccctatggtaagcctcattagttttagtatctgtcaaatttcagactgaccaatttggttatttaattaacttcacagatcagtttca

SEQ ID NO: 14478 - DNA, 3859 bp, Aquilegia coerulea
  Intron number 1 from transcript AcoGoldSmith_v1.003813m (l ocus AcoGoldSmith_v1.003813m.g) derived from phytozome v7. 0 (chr-ID scaffold_27; pos 2143183 to 2147041)
ggcctgccaaaggacattccgattaaggtaagggtgacatttatttttacaagttactgtataatgtttatgagaatatctctgtcatctctgatgacaaatctattgatacgtccatatatatttccaaactaaaactttgttgatgagtttatgtagatcagattctagattttagattcattttcttgaagggcagtttgtttatctttggtggcaagtgtaggcatgccatttttattaaccggcctctaattttgatacatctagctatcttagcacatcatatcgtattgttataaaagtaattcatgtgctgtagattttctgagcatcatggtcgaataattcagcttgtgaccttcaaattatgtttatttggaatagtaggatgtttgatgcatttaaattggatttttcttttcaagaaaaatttaaagagcatacatattattaaggtttatgttactttcctaatttgactggtgtctgtcaatatgtggtgtctggtgctgtaatactaatttagaaaagacagttttgcttaccaattcggtactgaatctggaatgacttggatttaaaaccaattgaaatagacttggttttggttgtgtttgacattttactggattgtaacgattgctggaagttcctaaaatgtcattattttatgtattaatatttgaaaacttttgtgcttatgaaataaatggtcatatatcacacattcacaccttgttaatataatgaatcgactctctggatgaattattactcattacattattggtgtgaatattgacatgtctttgcgttacataatggcacttggagaattagaattttcttaaaaactatttgaaatattaaaagaacagtcttcaattcctgttatgagaatgatacctttttgcatcatagactacattgattttttactgaaaaatatcaaatactgtttaagaaagttttttagaatctgattaggtcttcttgatgacatttagtgttatgggcattcatctgttatcatttttgggaataagatgtaatgccttgaatataatgcttacaatgatatccttaagtcatggtattacaattgcatattgacgctgacatgtctgataacggtagtagaacttcaacttactgtcctacctcagtcatgggtaaatctgtttgagaatggaacaaagcatgtttctcttttttcagaaccaagtctttaagtttaagataatatgcgaaggagtgtagtggaattatggttattttggctgcgggtgaaatccaagttctgatctagttcacttcagttatccgaaactggcattacatagaattgactgcacacgatttgctcaagtgtcctcaaacatttgggatcatgcttggtttctaattttaaaataatttgaatatagaaattcttcctgaggttattattttggcttaagacaataaacgcaaaatttggactggaatatatttcatgaaaaccattcaagtaaattaagtaatgaagtagagtagaagcaaagaagaagcaacaaaacgttattcacacatgcaggaaagaaaatgtgccaaagtagcaagataaattatttttgagcttaatcttgacttttttactttctagttttcaaaaatgtcacacttctatttgacaactttatttggataaaattggaagcaccgaagatttttgacgacttttgtgatgtgataaggcacacacgagcttggagtgtgcctaaggcagaaagtactaattcaaatgtccaagcaaagtaaagtgagcatgaggcttgccaacctatgccttttccttagattaaattgatgaggactatctttagttatcatgcgatggacaaggactatctttagttatcatgcgatggacaatatgatcatcagaaatgtgtttagaaacaatgcaccattgtataatgatttggaaggagcggaatagggggataacaaactaatcatggtggttagggagtatctttatggttggactagagagtgttttgctttcaaggatctactttcaaagtggaataagaggattttcgagcaaaaggccagagatgatcccaagctacttatggtggctatcgaatattggtctaagacatgttttgctttcaaggatctacacttccagggaggggagggggggattagaggaaatgagagtgatatcattgtatggggttttttcttgtacgggttttctttagaatcttgggttctgtgattttgctatggtagctttcctttgattcgggttgtaacctccttcattttaatgaaatacctcctatatatatataaacgacaggccattaaggaaagacaattaagatgattcctagctttaaaaattaagcaaaatatgaatattactacaagtaactgctttaagataacgataaattcttctgaagtctgtcctggtgaccattaatgagaaatcttggaactctaatatttgttgcctataaatggtggatcccgtattggtgatttggtaatttttttctgtatattaatggatctgattactggcaattgaaatttcattctatatactaccggttgtacattgaaattttagaaagaatgagacttgagatttgagacgttgaaggagtccgaactgtattgattttgctatctctatcaaccaacattatactgtagttgtcttcgggaaggactataaaaaggttaggttccattggtaagaatgacctgttataaatgcttccttgaagagagtgaaaaagggcgaagaacatgaaaagcgtatccagtttatagtcgtagggtatacatttgacaaatataaagtggctgttatttaggattgtgactgttatgtttatacgttaaaagatcccataattttggattctgtggataagcttattttgttaagtttctaggattaaacaaacctggctttgaaaatcaatcgtcttcacttgcctatctgatgaaagcttttcgttattgtgaaaagattcttgcctaatatattttttatttttgctttgtcttaaacatatatgcccaagaatcttagataaatatggatagactctatagtagttattattgtggaaacactaattcgggttttacgatgtgctgaaataattgtacggtataaatttattttcgtacccattaatacctaaggtcagggtaaaatgccttcgggtgaaagctaaagaccagaattaaatggatcattttgtaacatccgctttatgtatcatggaccaattacgtaatgtgattcctttcgttcttacggaaggttgttccatagggttttcatgttagaacttctgtaatagctttcttctggactccattagaatgaagatgaaagcccagctccttttgttagaaaatggcttacgagtctgaaatttcagtgctatggtgacgatatgttaaattaactgattttatagtgtatgcatttctgggaagatgaagtcttgtcaaccttgtgtccagatgtgctaccattctttattacaaggcgtttattattagttcggtttgcttgagttatgttcttgagcgtaataatctggatttccttgtttcaaaaggttgcatgtttaggtgttacctttcatcatgggtgtttcctgctttggattattgttcttggtatttttttatcatagtttagaatcaagttcagagttactttaactgaagcagtattccctattattagctaaccgtgattccaacactatcttttgggctcttggcaagggcaggtggtcaaagaggaggaggagccagcagacttcct

SEQ ID NO: 14479 - DNA, 2161 bp, Aquilegia coerulea
  Intron number 2 from transcript AcoGoldSmith_v1.014181m (l ocus AcoGoldSmith_v1.014181m.g) derived from phytozome v7. 0 (chr-ID scaffold_5; pos 4667293 to 4669453 reverse stran d)
ggttttgctcctggaaatcgtcagtggaaagaagagtaatgacttgtatgtagtaggttcaccaccgaattaacctcttaaattatgtaagcagtaattttatatacttggtggtgtacctctaaactaccttcaattctctgcaaataatttcagtagtggacaaaccatcataactaacttggctttggtgaaccattgcaggtttggaagctttggagaaacggtaatacagtggagttgattgatccgatcttataactgacagttttgttgtgcccagcggaaacttatgcaccaatacccaagattgaaatagtgtatgaattaaacaaaacaaaacaaaacaaaaacaaacccacacaaaacacaagatttacgtggttcggctaatattgcctacgtccacggacaaacaaacaatctttcttatagagacgattatacaagcccttacgaagaaaccaaagtgttcttcctcacaaaagttctctcaaactctctaatggcttctcacaatctctctctcatcaagattaggttttccaaccttctcattggctttataacatagccttacaatcaaacacgaaatgggcttaaacagtgcccatatagcacaaaagcaaagaaggacgtacgtacgtcgaacgaacgttcgtacgtcggaccacggagaagtagtctgtgctacaggatgtacgtacgccctaactacgtacgtacgttcctgaatgataccatcaacgttcgtacgtcgaatacacgttcgtacgttcagcaagaacaaagttgtctgtgatacgggacgtacgtacggcctaactacgtacgtacgccctaactacgtacgtacgttctcagacaaaaaacttccctccgtcctcttttccaaaaacaaaacccaacaattctccacctcggcgaaaattgaataaatctaagccgacaccaagtcccaaactcccacacttgtcccgaaggaccacctcggctacaccacctcatggttgcctacgtacccttctcctaagggatcaaaccttcgtagttcactccaatggcatttatgcgatgcccatcataccccgaggggtcaaatcccctaaaggggtcaaatcagaacaaatgcccatcaatgcccgtagagggccaacaaacacaattcaaaccaatggggtccaaactatcaaatactatctccactttatgaccataaccgactgaagatgagtatgaatcaacaccccgaaacctacaaaggtctccaaacaacggcttcacagctataattggctcatgggcttgaaccttcaaacaaacatttgtggctagcaaactaacatcagctgtgttaccagacaaactttcataaggagcggcatcaatctccacctgctgagatatctcttccaacttcaaactattgtctaaacaatgatgcccaaatgaaacttttcgtaccttaccaccattcaacaagccatgcttgccgatacgcctaccaaagccacaatcaaccaaacaatctgacaaactgggaggagtcaaacaatccaccaaatgtgaagaagaatctccaccacaaccaacaacactaccattaagatagtataaatttcgttgccttgtccctctcataacaaccaaaacaccagaagcaacctttaaagtcccacctttcatactaatcttcataccttcggactctaaagtaccaagtgagatgagattcatcttcaactccggtacataccggacaccaactaattctttaactgtaccattctccaacttcaacttgatagttcccacaccaagtgttttcaagtgacgaccatcacctaacacaacatcatcacaatctagcttttgaaaactagcaaacaaatctctactgtgacacaaatggtgaaaacatgcagaatccataatccacccttgagtggagcaatcaaccataacagccaaagaataatttgaatcatcatcactatcagcagcatgtgcgacatttaccttattatctttggaaggcgtaaaatcttccttctttgacaacatgggacaatcaaccttccaatggcattttccatgacaagaggcacactcatcctttgctacaggacgtacgtacgccctaactacgtacgtacgttcc

SEQ ID NO: 14480 - DNA, 657 bp, Aquilegia coerulea
  Intron number 6 from transcript AcoGoldSmith_v1.006965m (l ocus AcoGoldSmith_v1.006470m.g) derived from phytozome v7. 0 (chr-ID scaffold_4; pos 8036420 to 8037076)
ttgaaggagatcgcaagtaagtattgagatacagatccaaatttggatgtacaaactgcttgttctttattaatctgatgtaacgttccatttcctttgtttaaatttacagtgtcacacataattgtctttacacatatccataggcctacttctgctgttgtacttctttctagagtgatatgtattctgttaaatatatgagttggtgccgcagaatagttgagaacttgagaggacagaagaaaataatatggaaaaaagcgtgtattagcacaaaatcttcaagagagattcggaaagatctacaaaataatgctttacctaaagattaggtctgttacgaaaagattaacatcttcgttctgttgctttcttttcctttaaaatgatgatcctttgtaattgaatatgtatcaacaccttccattttaagatagtcattcatttacggttagaattaaaattttctgtttgttatcttccccaaagctgcatatgtcgtccaccagtttttcttgatttaaaaatattaaaacaatgaaaagcttataattactttcacatgattggcctttcgatgattcaaccttttgatgttcatttattatgctttttataggtttcagatatcgaccttggcaacaaaacttggtg

SEQ ID NO: 14481 - DNA, 2174 bp, Aquilegia coerulea
  Intron number 6 from transcript AcoGoldSmith_v1.003521m (l ocus AcoGoldSmith_v1.003521m.g) derived from phytozome v7. 0 (chr-ID scaffold_4; pos 2584437 to 2586610 reverse stran d)
cgaacgaaggaattgaggaagagaggtggaagttggtaaatagccctgacttcattttatatctatatacttgtaaacattttctttaactttagtttaagtgcaaggaaagaaaaactatacacaagtaaattaggattggtgactatgctgtaaaatattaattctttaatgagattagaaatttagagcttaatactgttgccgtagataatgcaaacaaactaaaacaatctgcccttttggggattagagtttatgtgcctttttttatattgataaaagataatttattgaagggatcaattttgccaactactcaccagtttaacatctttgtaatccttgcaaaagacacatacattaggagtgcccatttcccttaattccggtcaatgagtcaatcaatggttttaattctgttcaggaatgccaaccaagtgaaagaatggtactctgaatagtattgagtgtgctgtcagtagataatgcagacaaactaaaacaatttgttcttttgggattagagtttatgtgcttatgcttttctatatcgataaaagatagttcattgaaggaaccaattttgccaactagtcaccagtaaataattcacatctttgaaatccttgcaaaagccacaaacattaagaatgttcatttttcttaattacggtcaatcaatggtttgaattctgttgacgaatgccaaccaagtgaaagaatggtactctgaaaagtattgatttgacggaattttcttatagggaaaatcaataaaaatctcattgtgctctatcacttatcttattatacattctacaatataggaaaaataaattttcactctcgtttgttattaaatgtgccactagacttcatttcatagcgcttatgattaggcttggaagaagaggaaatccaatcagccatagcctcccatgaagttgttttctaccagtagcactttatgcgagttttcttacagaaaacccttccacccgcttacatgcatgcaccctgaagtattgctctctagttttggtacaatgttttagctttagcctggtaaagatgaactatgaggtttatcctgattgtcatcatgatagactaaaatcttccgtgttgaagcttttgtcaggaggaacctagcgaaagtttgcattacatactgtttaaggactgaaggattttatgcccatattttttcttgaggatccataaactggttctcatatggcagaagataaaattctctacaggaatcataataaaagaaggaccctaggtattttggcacaagtagaaccaatcatacatccgtgattgatgggtaaaaagagaaaccgacttcgaatagtatttttactaagctgataggaggtttagctacctatgctgtccatcagtagaaactgttatatttacaaaatgacatcaataaagaagaagaggattatttttagtaactacccagaataaatcttcaacaacaaagtaacaatgacacttggttgcctctatcagaaaagtaaaactcttattatatgaggagtttctaacaaaacccatagtcttcattaacctaacttgttaaaaatttaaagatactattttaataatgtaaggatagaagagaaaaatatatggagaattagaacccaagatgatgtcatcaatatgcatctcacattctcgcattgtctttgctgtggattaatgattctgtttatttgtggcaagtgttaattacgttctgttgacgaggcccaccctcatccccactgtactttcctgaaacaaggcaaagaagtaaagcacaaataaattgatcttacggttgagtttgtgtatagagttcattctattattttcttgaaaaatatttcattcatcttgtttcaaactcattgaagagttgagactatcaaacagaaggctgtgcattaccgaattttattttttttattggaaactgctattatttgtgattcatggaagttcttttggttgaggacttaacgcacaacaccattgtactttttgttgaggacataaggtcttgagatcaaaaatatagtttgcttggtatggtagtttttaacagttggcacttaatgtgaacttattgtttatgtgaactttgcagattggtcagtacataacttcga

SEQ ID NO: 14482 - DNA, 2884 bp, Aquilegia coerulea
  Intron number 16 from transcript AcoGoldSmith_v1.023697m ( locus AcoGoldSmith_v1.023697m.g) derived from phytozome v7 .0 (chr-ID scaffold_1; pos 11196928 to 11199811 reverse st rand)
ccttgcacgtgctcttctcagatcttccaaggtacgatattgatgcctcctgtgaatattgataaattccttgtttaatatattagacaaagcactaatgcacttgtacaccatttattagcttacattttaccgtattagcatagtatacattaaacaaagccgtaatgcacctatacaccattattgagagctctttgtatagttcccaatgcggattgaaaagaagaaatcacgaacaaaggattataaggaaaagtaaagtatttttattgtttgcatagatgaagtcgatttccattttttttcattaagttagctgacatctgccactcaatcaacttcttaagtaatgaagaatgagtttcggtttgagcaaggatatattttagcttaaaaccagtgcagtcaaataagtcaaggcactactgctgaggtcactcacttcacgtgctcaagcaaggtgtttttagtaggtattatgtcttttgtgtcatgagctacgcattaaatcttgctgcaacttgtagcttaagagcatgctccataactatgtcttgatttgtgtcttctttaatccaagtgctatacagtttggactttcatcaggtgtacgactttacatcagataaagaccttgttttagtaagttgacatttcgacgtaccttcaagtttaacaatgcattcccttagaggagaaattattagaagcaggaaaattatgttgttagtatccggagtcaccaaaattttcactgttatattctcttctaccatttgcggaagggtaagagagcagcaaattagggagactggatccaatttgcaaaggatcactcagacaatactcatgtaatctctaaggataaaaatctaatcaaattgactgagggaatacaaatcttggactccaatcagatgtcacatactgttatgaggaaatcaacacatgatacatctagctgcttaatatatggtaatgagctagatttatcatatactgttgaaaagtgaagaagaaatcaaatagaaaggtgagatacaatttgatgaaaggcaaaatgtgagatggaaaaaattggataaaatgttcattttggtcattgtactttgcccatttttgcagtttggtcacaacagttttttttctgtcagtttggtcataaaagatgtattctgtttgcacttgagtcatcagttaaatctccgtttagagcaacttaacggaaattcctagtggcagataacagtcctacgtggactattaaatttaaaatatattgattttttctctgaaaaataacattcaaaactggtcaaaatagtcaaagcttgtcaaaattaggaattttaggacgattgatttttttttctccaatcattcaaacaaaatttcataatgggtttttcatccatagagaaaaaaacaagagagagagaaaacgtggaatcgaaggaatctgtctttaatttcatctgtaattcaaaacccacctcatcttcttccccaatttcaatccccaaaccctagtttcaaattaatctcaatttcattttccccaattcctttaaatttttcaattttttttttcattttgctcaaatttcttcttcaatagcactaaacatgaaaaccctaacttaagtatcgacaaaaacaacaacaataatagaaaaaactgtatcaacaacaatacaaagtaacaagaccaaaacgattacaagatttggatcttcttgatcaaattggatctggtggtccaggtttattatggaaactatactcaacaaaacctcgttcagcttcttcacaatatctaaatgtttgtgtttgggtttcagataaacgtccaatctctgaagttaaggataaagttggtttatctaaagtgacccataacccatttgaacaacacaaagaggtagaacaatttcacttttcatagcttcaatttgcaaaagaatctagaagaatagaaagaaagcgaagaagaagatgattgaaagaaaagaaaatacttgaattcagaaaaacaaacaccatatggcatgatttgcagattatatatgttcgggaagaagaaaacgagttggaagaaaacaaaatgctaaaaaaaattctgcaaaattttatctcatgtgatattcatgtgcctccaaatagttgttgcttcatgtgcatgtgtgctatgcggacataagaaaaatattaaaaaaaaattatttttaaaatttaacaatccacgtaagatggttaaatgccattaggactttctgttaagtgctagaaaacagagacttaattgatgactaaattgcaaacagaatacatctttgataaccaaactgaaagaaaaagtgttatgaccaaactgcaaaacacgacaaagtacaatgaccaaagtgaacattttatcgaaaaaattgtagagatgaagaaagtaagtgaatgccatcaacccttgtctgtatcatgttttcacaactttgcttgtacagattcctcacatgaaaaatggttccagctttaaattacaggtgacttacaattatgaattatctgaaagagattttccacatgtaaaatatcctcccactcccacatctttaaggggtaatatgtaatattcctttcttcaaaatgtaatgtggtatgaaatgtagaaaatatgttttacttattagtgattcaaaacgacatctcacatttagtaatagtaaaattttaaaattgtttacaatctgaaatagcttgagggaacatatttcaagaattgaagttcagatttgtttgattgacattcattgctttatgtaggcttccttgaaaagtagatgtttccttgcagtaacaccatagttttgtgtatattgcagctact

SEQ ID NO: 14483 - DNA, 3329 bp, Aquilegia coerulea
  Intron number 2 from transcript AcoGoldSmith_v1.005413m (l ocus AcoGoldSmith_v1.005413m.g) derived from phytozome v7. 0 (chr-ID scaffold_53; pos 441116 to 444444 reverse strand )
gacgaacttcgacaacagtttctggaaattgaagggtaaaattctttattacatggatttatatttttgtaaatatctgaacgggaaaattggcgataaccccccacattatggtcactcttggcaaaaaccccctcttttgtccatttttggtattaaccccctaacccccaaaattagaccttatgttgcccagtttacccctgacccctcctatttgagtaaatcccctcatttaacgtcaacataagttaactaaccgatgttaactcctacattttttgcattaacaccctcccaaattaaaaaccaaaattgaaaattttacttctaccagacgatgaattagttctcaccagcaccaggcgtatatttaggacgcttagtcttctcaagctcaagttgagcttccataaacatctgcattctctgaaactcaagatccttagtaaactccatcctctgcctctccaattccataatttgctgctgtttagaactctcaattctctcataaacctctccaaacttaacaatcgcttttgctatttccctaaacgcctccccatcatcatttggcaccgaattcccaataaccccattactcttcctactcctactcctactaccaccaccaccaacaccaatatcaaccatcaaatcttcttcatcttcatcatcatcaccatcatgagaactcccagtagatccaaatggagaagaattcaatctggatttcgacgaagacccaccagaataaatcacagctgaagaattataatgattatgattaggattagggtttaatttcctaacagaaaaattaactggagaagaagaagaaggatgttgaggtaatggtggtggtggttttaagtttaggagtaataacattaggtgtaccaataagttgatcaagatgagaatgaaaaggccatttagaaggtaaaggtttagatctttcaagtttatatttctttttaatagtatcaattcgattcttacattgaacatcagtttttcttggttttttaatagaatcttgacgtgaattaacagcatcagcaacttctttccaatctttttgacggagatttccacgacttaattgaagataacgatctccccaagcatcaattagtgttgctgttgcgccttcactccaacaatcttctctaccaccactaccactaccactgtgattaccgttgtaaggatggtgggaccgattcgaggtaggggatgcaaataagagttggtgtaaacggagttaacatctgttagttaacttaggttgggatgcaaataagagttggtgtaaacggagttaacatctgttagttaacttaggttgacgttaaattagggggtttactcaaataggaggggtcaggggtaaactgggcaacataaggtctaattttgggggttggggggttaacgcaaaaaatggacaaaagagggggtttttgccaagagtgaccataatgtggggggttatcgccaattttccctatctgaactgaatgtgaaaatgtgaaatgaatttggtatgggttggaattgaggttgttaaggtactattattttgtcgaaaattttgataataatttgatggaggactgaaggtggtgttgtgtggtggggaacttgatcagtgaagactaggttaccatagtctatattaagtcgttgaactttgacttaaccataaaaattaagtgaattttttgacctggaaaatatccactataaggagtacgcaatttgatttgtggcatcggtggtgtaggagacagaagagtttgcatgtaagctttaagaactggtttggaattggaagtcttttttatattgcattgtacaggaacaattgacacgactacctactatgctttgagtggtatgtatccatattccagtagcaaggacatcgctattttattggtagctctggagtgaccatcggagagttctttcacagggggcagggatatttctcttgaagtaattcaactagtcttagccatgtagatgactagatgagaacttctcattgtgtcactcgaagtaattagtgatatccgccggccgagaagatagcttccaatcccccaagcttcatatgggaaagggtggctacacttaattattgattttagtaagaacactattatgttcatagatcttggtcaatcgtaaattgttcttctagaagcatgaatggagtacataccatctaaggcatttcaaagatattatatcaagatggccctggccagacatattatctttggtgttctctatcacctagctagtcctctatgggtaggataaggactccctatttcaatgtcttgattgcccccagccagccaaacaagagagatcactcaatctatgtttatgcattttcgaaatcctggcagagagatagggaaaaagactattgctaagaatatttcttgtttcattttctaaatcgtgacagagttagggaagagaggagatgaaggatagtcactccctttccttgatagtgaacacaatttcttgttttattttccattcctctgggtatagaaacatggactgttggagctatgcccattctccctcttcttccggcttaatacatggatataattgtttttcttactaaaagcaatattaaaaaccaagaagaaaatgtaattgtttctagtagtatgactggacctctattcatgtatcacactatcacaaactctggcctaccttggtctagagaactatataagttgtcccatccacattcaactgctgttgaacttcaaatttgagtccaaccctcaattttttatccagaacacactgagttggaaagctttcgaaaatgtgtctgtaagacaatggtattttctaattttcattagttagttggtgaaaaaggttcggttcacataattcggaatcatgagtatttaaaatgcataacagaaaaaaggaaagcaaactattgaggatatgaaaattaatatccctgtcaaaatgaagagaacttgtttttccttttttgcagattatcatggagcaaaactatctctattttgtggcgaaattaaaatagatgccagaaaacccattttcgataacttctcaattctaattgttattgggaactgaactgtgttactcatgactccgatataaatgctactgcaatacattcgctacaattcagtgtttcatcttagcctttaggcattgtcactattcagcttggtagttttctttcctctgaacttcttgatggtatcagctttgcaggctggtgataaaagctgaag

SEQ ID NO: 14484 - DNA, 881 bp, Aquilegia coerulea
  Intron number 4 from transcript AcoGoldSmith_v1.001032m (l ocus AcoGoldSmith_v1.001032m.g) derived from phytozome v7. 0 (chr-ID scaffold_30; pos 191843 to 192723)
ctcatccttcgcaaattcagtcttcacttgaagaggttagttaatcatagttaaaattagtcaatcaataaattgaaagggaaaaggtttgctattatgcatcatggtagaatggacaaaatttcaattctttttggtcaattgtggaaatatctgtacatcctgaaattatccaacctcatgatccattataccgttgtttatgaccatttttttgggtcaattggctttctattgtcatggatttcatcaaattcgtgctagtactgctgatccaatataaacgattaaagaagggaaatttggtgtcagagttatctgcatgactcatggtttctactcctggcaatgtaaaaaaatgggtgaattgatggaatacgctgcatttgtatatatgatgaggatattgaatgtgtccaattttgtggctggattactttataggattgagcatctttatctagaaataggtttattcttattcttagatgttaatatgcgttaggccccgtttggcataaaaatgtgattatgcaaggtttggaagttgcataaaacataaaagtaacttttggtagttttgcgcatttatgaaagcatcacttctaaaagagaaaagcaagaacctggttcatagatctttctatttttcgttttacactggcaattgtttttcttctctattctgcccttttaaataactagaagcttgtgtttttttaacatgcttatgaatgagcaaaaggctgcttttaagaaatggtaattaaggtctttgtgaactcaatgttttactaatatattttgtttgttttagtaatgctaatttatgagctctttttttactattttatattcctgtcttttttcaggccgcaaaa

SEQ ID NO: 14485 - DNA, 3411 bp, Aquilegia coerulea
  Intron number 1 from transcript AcoGoldSmith_v1.003062m (l ocus AcoGoldSmith_v1.003062m.g) derived from phytozome v7. 0 (chr-ID scaffold_10; pos 3178446 to 3181856 reverse stra nd)
ctggtaagtaatactccactaataactcttctcatccaacttgggtaaagttttaatttaactcggaaagttttataagctggcttttgttcaattgtgaactattcaactcaagatttatatatagtgaaattttaaattcttattgagctgaaaatgctttgtgatgcttatcttagaaaataatttaagttcagctgtacaattataagtgagaattttgtttggagatatttcgatgatgatatgagttttggcctgggatgaccacactctttatactgcttttatctctaaatatcctataagctaagctaagtattatagtcatgataaagaggaaactgtaatgctgatagatgaatttctcttattcacatacatattagtatattaccaccttaactgtattgaccatttttgtgaggttggtcaatacattaatgagacatgaacaccattgtatacgtggttcggcaattgtgcctacatccactacatccacggagagagagaatgatctttattatagtagtggtggtgatacaaaatgggagctcgattatgaggagagctcgagagagatgagacctgagaggtgaggtctcatcatgagagattagggaggtcgttgatattgagacctcaccatgagatagtggtgagagcattaggctatcagaccatgtctagaatgagtgatttgccttcatatttataggctacaatgtaactccattcctaacatttattgaggtaatgatgagagaatatctttgtagtaattggctttaactttgtaacttgtgccatcaagagagagcccattagatgttgacatgtggcaccatgatggacggtagagatggtgccacatgtatgttgtatgtagtacccctacataagccccctctttttaggttgaacgaagttcgggctgaaaagaagtaatcgaaccgatccagcccccaagatgaatgaaatgtgggggtttttaacgaagtcgatccgccccaaattttgatgagcttgatcattgagatttgcaggacgcgatgaaggtcccttgtggtaatggcaactcgatcataactttgtgtgtagcgagctagttagttccagggagacctggtagctcgttcagaaggcatgtagacgagatggacagctgcaagcaggtcgtactgaagtgggtcttcttgcatacatgggtggttgtctttttgtggtcgagttgcatagacctgatacttgttgataatgttatcatgtgaaatattataaaatttagttagagacttacactgaactgtatgtcttccttatgacttttgtatgtactatcgttgtcgccttgtgattggacattccgatcgatgtggcactttggagtgcacatgtagctcgtttgagaaagaggattggttgaccaagtgttttgagagttacttggaaccttttggtgcccgatctagtgaatggtcgcagcgtggagacctgtttgacaattctcaggcatgtggcctttgtgggtctgcattgcgttgagagtgaatgcgttcgaccaggcgtgtggctagagaattgtgtttgaggttgtcccgcatacgagtgactcactagtcaatgagggtggccgtattgtatatcaagcatttcactggtaaagagttcagtgaaagcaatgtggcatatttgtgcaaaaatagctcatggggagtgaggtcgtgttcatgtgacctgcacatagagagagctacaaaaaatatcattaaaagctaattgtgctaataagttaatttgattagataaagtgagaatagccccctgtatggcataaatattgttggggtcgttgaaagacctgtaagttgaggaggtcgttgatagacctggtgaggtcgcgatgaaggacctggcatgaaggacctgagaggtcgttggcttagggacctgagaggtcgttggcttagggacctgagaggtcgttgacttggggacctgagaggtcgttggcttagagacctgagaggtcgttggcttagggacctgaatatgtgaggaggtctctgcaagacctgaacatgtggccattaagaatgtaactgatatatataatcatgatcgagttatgagaatatatgttacatagatgcatataataatcaatttgtgtgagataaaatagaatgaacagtaagatcatagtgaattgatacttatcttgctttcgtcgagtttcacatacagtaatggtaaccgaaataaaacccccaatttggaaattgtgattgtcattctgccaaatagaatttcttgaacttgaaatcaccactttgagagccttacaacaatggtgtaatggtggggttggtgggtggaattcgcttgagaaaatcccaagtccctgtagtcggcgccaaatgtattaaccatatttgtgatgttggtcaatacattaatgaatgatgatgatgtgtatgatatgaacaataacaaagtagagacgtgaacaccattgtatacgtggttcggcaattgtgcctacatccacggagagagagaatgaagtttattatagtagtggtgatgatacaaaatgggagctcgattatgaggagagctcgagagagatgagacctgagaggagaggtctcatcatgagagattagggaggtcgttgatattgagacctcaccatgagatagtggtgagagcactaaactatcagaccatgtccagaatgagtgatttgccttcatatttataggctacaatgtaactccattcctaacatttattgaggtaatgatgagagaatatctttgtagtaattggctttaactttgtaacttgtgccatcaagagagagtccattagatgatgacatgtgacaccatgatggacggtagagatggtgccacatgtatgttgtatatagtacccctacatatggcgatttgccttcatatttataggctacaatgtaactccattcctaacatttattgaggtaatgatgagagaatatctttgtagtaattggctttaactttgtaacttgtgccatcaagagagagcccattagatgttgacatgtggcaccatgatggacggtagagatggtgccacatgtatgttgtatgtagtacccctacattaactactgcttacatttatttggtgaagatgtgaattactatgctagttttttttttttttaatgaagttttgaggggcagtcgggcagattatactgaagagttacatttttttacccataggattaatttcttactagggtgatatagtcatatagatgatgattttaatcatttctaagtatttgttcttttttttttttttttttggacagcaaagatatttcctgtggtaaagaatcagcatctt

SEQ ID NO: 14486 - DNA, 721 bp, Aquilegia coerulea
  Intron number 7 from transcript AcoGoldSmith_v1.008055m (l ocus AcoGoldSmith_v1.008055m.g) derived from phytozome v7. 0 (chr-ID scaffold_2; pos 1301210 to 1301930)
ttgtagtaccggtgagtttgatattaaatcgtccttttttaaggctgtattactatgcagataagacgataagttgcagccaaaactaacaaagtagtgtatagtaggcttatttttgttattctctggaaaccaagttaattaagcactctttgtatagtgtatgaaatagtaaggatcattttgatgacctagaagacaacatttctacatatacacttatgcttaacaactgcagaggcaagaagagacggttatggcagactttaatattgtctttcaacaatatagaaccatactaaaccaaatgaaaaatgaagtgctatcttgaataccagacttcaaaaactaaaactacaaaacatgttaaggctcatgggtaggtactgaccgtactgtacatacattatagtacaaagcgaatgggcctgtggctcaatggtagcacccctctcacaaaagtggagaggttgtgggttcgaaacacgtcaacagctgattgttgatataagtttccacacgtaatttaaaaggggtaggggtcccctcaaccccgcttgccaatcaaaaaaaaaaaaaaaggagacatgtttattagaatggttaaggaatgtacatttcatacttttatagttttatgtcctataactggagaggattttgatgttagatcgtttgttgcctctgaacagcttgataagttggaacaagaaacacttaa

SEQ ID NO: 14487 - DNA, 1399 bp, Aquilegia coerulea
  Intron number 2 from transcript AcoGoldSmith_v1.010965m (l ocus AcoGoldSmith_v1.010767m.g) derived from phytozome v7. 0 (chr-ID scaffold_9; pos 3346621 to 3348019)
aggtaattctttttctctctctcatatttcaatttttaagtaaatctgttctaattcttctgcaatttgttgcactaatcagtgagttgaattactagacacgtgattagaattgtaaatcttaggaatcatccaatctactatagttagtttttcttattgttttctctattttgttttgattatatattattaccaaaaggtgattttatatttttattatgccctaattgacctgattttgttaatcaaacatcattaacttactcttttgcacttatgaatttttttttatttttttttcaataattaaattttgtgttgcttgttatataactacaaaaaggggttatgtccccatttcattttagaagagtaaaaaattagattgaaggagataaatggagttcttacgtttcgcatattagctgtgctcgcgattcctccatattagtaaacaattgcaggatataatttgaattatagtcgatgagatgaagggttttggttgtttaggtagttttcagttgccacaaccaaagtagggcagctacctttaaaattgttataggtacaaaatagatgctaaatttggacggttttcgcgttttatgttatggatatttttgtggccgagcctcctactaggggacatcagagtctttaaatcgccaagaccctgtttgatatagcttaacaacttaccacctagatcttagaaggggccatgccagtgtaaaatttttaggccagaactaagccgaattatttaagatgcattacaatggacaatttcttaggagttttctgctggtaaagtacattaatggacgatatttttgcattaattattcccatggttataaacagagccttagattttattatcttctagctagcaaaggttttacttcatactgttggttcctttgctttagtagattattatatacgattgcacatgtaatcataactttctttgacttcctctactgctttacatatatagaatgatgtacacggaaattcaatgaatttctaaagtgttttcagttcaatatctgaaagtgtgcatgtacttgtacattaaattgaaagtcccatttttttaaaaattaaatcttcttaaattcatgatttcaattcaaaaaaattctaaagaaaagcaattttcttatcaagacaataactaaatatttaaatcctgataaacttcatgagttcatgcccttgcattatagcgattctattatgagctcttcagttttttattttctctaaatttagatataatgactacttcaatcacctcattacgttacaaaatcacagttagattggcttggagtactaaagtgagtgttattttctgtgtcttcagtcgccatccggaagtatt

SEQ ID NO: 14488 - DNA, 944 bp, Aquilegia coerulea
  Intron number 6 from transcript AcoGoldSmith_v1.010055m (l ocus AcoGoldSmith_v1.010055m.g) derived from phytozome v7. 0 (chr-ID scaffold_53; pos 1129454 to 1130397 reverse stra nd)
gcaaggtatgtattctcctcgttagtaagtaaatcgaattagtcctctccagtttaattgtccaccttatgatacgtcatgggtaagaacagatgaattttccatccaattggatagcaagctcaccgaaacctcaaatgtttgtataatatagtgcatttctccttaaaacaatggtcatttcaagtaatagacatgttagcatgggcaagttgcgtactccaagagtgttgcacaaaaaccaggtatagaaagttggctttggtcgttcctgaacaggcagtgaggttcaggtgctagatcattcattagtttggtaccctccgttccagaagttcaaacaagataaagctgcaaaatacatcatttttcgaacaagattttctactcttacattcaaactcaaagaaaaatttgtttacaaccgtatatgaatatgtagcatctcttgagggcacacttattcacttacatatgtgtggtggcttaaataagctggcagctgtagtagtgtgatcgttttagattatcttgattgggctaagtttttaagatgttataaaagcttcttgtaaaatgacgttaccccgttacgatggtaaaaagcaggaaaaagttttatatcttgcaatctcaagtaaggttatagattttttttggctttcgagccatctgaatatgtgattgaacaggggcagttttaaagtgtttacaatattatcatgtatcttaggattctccgtgattgtacccaattatgcttccttccatactcagtttatcttcagaaatattgactccataatactctctatcactctgttacagtgataaagtttaatcgccttaacatatttacatatttctaaattatgtactgaataaatgcagtcatctacgatttctccttggttaacttcaatatgttaaattgcagatagcag

SEQ ID NO: 14489 - DNA, 1104 bp, Aquilegia coerulea
  Intron number 3 from transcript AcoGoldSmith_v1.017471m (l ocus AcoGoldSmith_v1.017471m.g) derived from phytozome v7. 0 (chr-ID scaffold_30; pos 158821 to 159924 reverse strand )
cctcaagtcccagctagcagttgctcttttcaattgtaagagctaagtacttttgtaaacagtttgcactttatttttatttaacaacaaaaaaaaaaaaaacttatgtaaacagttattgtagttctactatgtaatgtccatgatagaattatattcttttagataaaatgaagttttattatggaatagatggaccagtttagaaggatggtctcttggaagttttggaagtaagagattgagaaatgaagagacacactcaaaaagatacagggatgtttaaaacacagtcagagtaaaacaataatacaaaagataagagtcagttcctttaggtggtgcctgctaatcgtggttgggtggccagttgagtggacttggcatcatcagttttttgttggaggcagagttcgactgatatttcgaaaacttttgaggcttaccatcgatgatacacttatgtctctgatgtttagcgtcatttatattctgtatgattatagcctcaccttgatgtggcgtacagctcattcatgccacgctaaatgctgatgggattttatgttcttaatgtgtttccaccaatcctccttttttagggatgcgaagattcacactgaatgaaagtagcatttcaacaaaataataccaattgaattaaacaaacaattaaattatattaagataggagaaataaacaataaacatgtagttccttaatcaaaaatgttattctatttctttgaaaagaaaacatagttatctgtaacagctgaaatttataggagacatgcgccaatcttctaccaaactgaaggaatagtggacctattctgtatccatttgccgactcacatgtgtgacatgcgcttggatgacaataagttggaatatgttgatttaagttggaagttctctgtcataatgtataatgtcacatttactcacatcattagatgtctaattgagggctaatgtcgatttactatacctctggatacgtggtagattgtaacatactaacatatatatttcatttacactgactatgtaccgatgtcaattttacatttaatcattagattcagttttctgtagcta

SEQ ID NO: 14490 - DNA, 464 bp, Aquilegia coerulea
  Intron number 6 from transcript AcoGoldSmith_v1.009332m (l ocus AcoGoldSmith_v1.009332m.g) derived from phytozome v7. 0 (chr-ID scaffold_4; pos 9095544 to 9096007 reverse stran d)
tcgtgctccagcttggtagcacatttccagtcccggtcagttgagcttcttaccttctatgtaaaaagaaatcaaaataacgtcatccttgtcaatgggccaaatatacaatagcgtgttaaccctgtaggaattatttgtttcgcacatttctttattcagctcaaagtgcataaacattgatttgatgccacataaacgaaacacacccctattaaggagctggtttattaacatggtttctagatagcaacacctatttgatctttattgttcaaactcgctgatttaatatatgcaaccaaaaacgggtctaggcccaaagattcacttaccatgtgtccataaaatatatttaatgaatttcagaatattagtaggttacattcatgagaatcatctagcttatttagttcatatcgtatgtaggtagaggtccttcctgccgccatatcacctgtgct

SEQ ID NO: 14491 - DNA, 4550 bp, Aquilegia coerulea
  Intron number 3 from transcript AcoGoldSmith_v1.004602m (l ocus AcoGoldSmith_v1.004602m.g) derived from phytozome v7. 0 (chr-ID scaffold_11; pos 1558775 to 1563324 reverse stra nd)
cccctgggttcgttggaagaccatctgcgtaagattgaaatgcttccatacttgtgtgctatcttcaactataattggaagttccttgatttgggtgtcactcatttccttggagatagtaaatagtaaacaaatgcattgaaaatagtctacaaaatgtgcgtctagagtattgtttttgaaaatactttggctaggtttggtaatgatgtttttgaaacttctttggttatgtttgataatgatttgccagtggtaaataggctatttgccgcgttttgggcatttaataaccattttggcaattttggcaaaaggatttgcctaaaaattgatcacatgaccctttttttgccaatttgcctcaattatgaccgaagtacgaaatatattgtttgaggctttgctggttacttatgtatatcactcagattcctggccatacgcttctttctgtagtgttagttttttctttcattatgatcatatgatttatcaacttcgagagtcatattcttaccatctgaaaactgtagaaagcgcctacatcataatcttagactgaacgtttaataatttctgatgatgatatgattcgatttataaccataatgaaggtatagtttcactaataaactattattaactgatgatatgtttacttaaacattgcataaattgttatggttaggaggaacagtactacactagcctttttactagtggctgcattcttaatgaaaagagctgactatttaaagagctacacatattgatcagcttcacacatatgcacatgtatacaatgttccctaacacaattaagtcagaaaccgtgagatatacttgttgccagatgatgaatacttttccagagaaaaaagaaagaaacttgctcaattccaactcagtaatacgaaagatacttagggaagttcaatttcgcgacactaaaagtagttcagataaataatccatcatttgaaaatctgatagcttgaaatatttgtatttttttttgagtggcaaaaaaatagattttatttatgacaatgtgattgatggaatcgcactaagcccccaaaatgatggttacaacagttatactctatcacaaatcttatcccccacaataacaaataagatcatccagaacgattccccttagtgccggagtgcaaaaggtccaatatttgtattaaaatttaaaatgtatattcaacattaaagacgaaattaattatttccaatagtgtaataataagttgttatctttaggagggtttagtactacacatagcgttgctttttgcaccagtggctgcatttttattgagaaagagctaaatatctaattggacaggactcaggaggctatgtcgtgagcttccgaactccttttctttttcagatgtttaatatttcttaatcaagtgtcaacttattcttattctacagcttttaaaatggtcatcttaataaggatgcttcttttcttgatctttgtgcttgcacatcgtctctctggatttctcaagttactgtttgatgttttgttttgtggatatagcccaagtagcgatatggaattattttaagatataaaataggggaacgtgaagcctttttgctttagttatcatctgtgaatggtctccaagttataccgacacttcctcaatagtaatattcttcagattacccagttgttccacaaagtgggtagaagtaatagaatgactaaaatatgttggtacttaatgattataacactgctacatctgcagcattttaaattgcacaatagtctctgcttctaatcatgactgttcaacttccagtttgattttagttatggttgtggtgtaagtaactctctatgaggtgtgtgggctgcgggttgtctgggccgagagttgagttaatttaggctggtctgaagaccttacatgttacacactttggccaattgttctaaaacattttgcccctgagatgtctcttatatcacgtgcatcgtatttatcccaatgttgtcaactcgtaaatcgtaattgataaagtttgaatcgaacagtaaatcttatagggttattaataaataatattaatgctagaaaaataaaaaataatctaccatccataacttgacaaaagaaaaagcaagtatctaataaagtatacattaaagctatattcctccctctctcaaaaacagtgttgttaaatcgtccggttcaaatcggtgagccgtacgatttgactcaaatcgtacctaactcgatctgactcggtgagttgaatcacatatagactgaatcgatcgagtcaaaactcgaatggaaggaatcatcgacttgatttgaatcgttagattcaaaaagtagaacatagaatagaaactctcgatgagtttgatttttttaaagatctgacggctatgtgagtcaaaagggtttgtttttcctataagtagaaggggaagaaaatagagattcctatacacatttctgcccctgttcctacttcgtcttcttcaagcttttttacaagaagtttgattcttcaacatctactaacttgatattttgttccaagtatgttaaaaagttttttatttattacttttctactgttctacacaaatttgtttcattctctaacaacccacttgtctacttttgagttttttattgtttcttttgaaaacaaagaaacaatgctgccacgttatatcacattgctgatatgtttttttttatggttctacacatttgcaatgctgccacgttatatcagaattccttttttacttttttcaccatcctttgcataagattataatattaataatgtgagaaagtttgtaattaaacccaatttttttttttcaaaaaaaaataaaaatgaaaagaatgtaaatatagtaaaattgaagagaagaattcttttttatgaagtcagaactcagaagaagggcactagtggataagaagatagagtaaaatattaaaataaaagagttgaaagaagatccaaagaaagaaagtcaaagaaagtggttgtctttgttttcaaaagaaacaataaaaaactcaagtagacaagaggggtgttggagaatgaaacaaaattgtgtagaacagtagaaaagtaataaaaaaaactttttaacatacttggaacaaaaaaccaatttggtagatgttgaaatcaaacttcttgtaaaaaaacttgaagaagaagcagtagcttgaagaagacgaagtaggaacaggggcatagacgtgtatagaaatccctattttctttctcttcttcttataggaaatacaaacccttttaacttccatagccgttagatctttaacaaataatcaaactcatagagagtttctattctatgttctactttttgaatctaacgattcaaatcaagtcgacgattcttcgatccgagttttgacttggtcaattcagtctatatgtgattcaactcaccgagttaggtatgatttgagtcaaatcgtacgattcacccatttaaaccggacgatttatcaacactgatttacactagcctctcttacaacatagtcatgagtactattataagtaggactgaaccaatagtttcctagagatatcatgtagtctttagttcaacttggtcattagcaagtgttttgtgacatcagattggttgaacaaagtagttctagatcaatataaacttcaaaaatacatgaatatcttcaatgattgagaatatcttactctcactatattcttccatactgtgccccagtctacctgttttatcaaaatgacatatgcagtgaggctcataatcaggttcaatgttttatttcgttcagtaggtaagcagtccgagtgtttgacttcttggttcaaattatttttgaaacttctgccttatttctgtggaccacattagaaagatattgaacgacggtttttaagaacgaccaaccaagttctcctttgccctggcagcccttatgaatggaagatctttctttagtatggtataacttctattatgaagattcaaaattaacttatatctaattgttttataaaatttctaagaaacataactatatcgggtacttaattatattttacggtttcgtttttgttttatcactatttcatacaaaataagagaatgtgagttgaaatggaagagagaaatgatctacaataatcaattaggttctcaagttgatctttgttgttttggagattggctttgttgtttgtaaagctttatgacaagggcgtttccaccttctaagtacatcgattattgctgtgggatattgtacaagttattttcctttggtttgatgattagtgagttatttgtagtatcaatgaaaaattgaatatacaaatatgtaaccgcagatattgtacaattttcatatactcagatccacaaattttaataatcacttcgcaaataatagctaatatttctttctgtagatctaccacctgataaagaaccactagactggaat

SEQ ID NO: 14492 - DNA, 2639 bp, Aquilegia coerulea
  Intron number 1 from transcript AcoGoldSmith_v1.020954m (l ocus AcoGoldSmith_v1.020954m.g) derived from phytozome v7. 0 (chr-ID scaffold_13; pos 3057845 to 3060483)
agaggaaaactttacgagttcagtaatataaacaggtaataacatattcatcattaatctgtgatcttgtttaattattagatgattagagatgacagatcttttaaatcagatctaattaattactgaaaaaaaaaaaaaaaaattaaaattatggatttaatcaaaattttatgctacgtgttagtgttggaaatttcctttcttagattaattatattctcaaagaaaatacaaatcttttcttctctgtcagtccgtacaatattaattgagaaaaattgttttagataagtagtttcttggtttctgtacagtttcatcttttagagttaatttctacttcatagatagcttcaacttcaactccaaagtttacagtttaggcaaattcttgatattgttttgcttgaattaaaaggtattgttgttatcttccattccattgctatcagtttcaaattcacatatatatattttagggtttcttttctttagcttttgttgtgagatctaatattgtttcttcttatcttctttaagctgttattgatggttttttttttctcactatgtttcatgtaatttcatgatctgattcagttgtattgatatatgtttgctatgaaatcacatttgaagtattttgattgattattgaacacacataaacacgaattttacagaagaaaaacagcgaaatttattcatataaatttataaatttcaaccaaaactaatttatacatttccggcactaggccaatataagagtttgtccaccagggagaacaaatgtactttttttcttccttttttttgtttgtttgtttataaatacaaatttaatcgtgaataggtaaaagttgattttggcctaaaattttggacctgaattaagctgtacatttttgagattcattcagtactgtgcataccttgcgtaaaatatgtattaatgtgtcatcaagttaatgtaccttctccctgacagcctgaccattttttcagtgttagagctatgctatgatgatacacaaatatcacctctatgtataacactcttgacaaggttaaatgaggtgcggagttttatctatgtcactgacccaaatgaagattaaaagcctagctggctccaatacgtctatccatttccagataagctacaacaataggcttattacatacttgacctatcaaagctcatttctcttcacaccctcggtgtgacttgtgagtgtatgatcctagtgtccaactagcgtccttgggatgacaataagcagttaaaacatataatcctcaggtgttataatcaatgcatgtggaatgattttatactgacggtttagactttagaaactgctaatgagtaatgatggtagactgtataatctgactatttcaagcaatattgagtttgttatctgcggttgtatggtctctgttaccaaatagcttcctcgtatttacttaagacctttattaggttatagcgtcttaacatatctgctgcactcgtcttgaccataggtttcgagtccttaattatcactagtaccccattcttggttttcatgatgtactcccacgcgtatctagcacatttataattaatgaaccagacaagtatcaagatcctccattcgaagtaattttaagaaccatataggcctgaatgtacaagatcaaggattcttttagtgcacttggccgtactaaaattcactttgcactatattctatacatagaatcctacagaaattagtctttgcagtcttcattccaccacaaacctaataaatcttctcactaatatgctcaaaatgcgtatctattttaatagttcatgaaacaattcacgtggtaacaaatttttgatatatttttcttgtttaggaagagttatgaatttagaaaattttatgccttgcaaaatgtaaaaaatttcatgttaaagatctaagatggctttcaaaaccagcttagagctccatcttcaactacaaacttgtaatcatgatagtctcccaagacagccaaaatattttcccaagttaacttctatttgcctaatattttcccaagttaatcacttcttggcctaggtgtgggattttaaaggcctcaatgctagttgaggagagatatttctaccttctaatgattatggaactaatgaattctgtctgttgcagcttacatatgtaacctagaatcacgaatttgcaagtatagaattaatgatatttgatatatagaaaacaataaaattgtttagttgacatgaagtatctatctaacaattaaagattctgtgaaaagtaaaataaagctattcaagtaatcatagccagttagaaaaggtttccattggattgattaaatcatataaaagaaaaacctactgcttccaggttttatacaatattattttttgaagtttttcattagtaagtcgaatttactatgaaatggtttctcttagaaatctgaagttatttgtatggtgtgattctaatatgtttacagcaatgatctgcttcgccccttgaagtttacgcattaacagggttatcttgtatttcatgatgtttcagcttgcaaaacacaatagaccgctatcaaagacaca

SEQ ID NO: 14493 - DNA, 1062 bp, Aquilegia coerulea
  Intron number 2 from transcript AcoGoldSmith_v1.001974m (l ocus AcoGoldSmith_v1.001974m.g) derived from phytozome v7. 0 (chr-ID scaffold_16; pos 3676100 to 3677161 reverse stra nd)
ttacagttgttcggaaatcaattgacgctaggaaggtttgtggaaagtcataagtcttttgtttcctcctattgtaatatatctatagatatttgaatttcatttaaacttaatattagaaatctcagttactttctagtggaaagtctaagcctccacatgttttttttttctctgtgttccatccagcccgagtctcacttataatcttgttaattatttgaaatagatatgtagatgtctgtgatagcttgaaggacagcaagggtatcaacattaaagtaagacgcgtagaataacattaccaaacttatctaactgtagagcgaactgagaaaaaaggactgatttatgagaatcgattaattcatcgaacttctataagagtatgaaactatgaccattatatgtctcatgtaccttttatgattttgagattaaaatataaatataaataattgacaggagaagttttttgctatctattaattagttttcagtagttagtagttatattatgtccattactccatttgttaagatttagcaggaagtctatggaactattagctcaattgaaatatataaaagtgaaagatgtatttggtattgaatgtatgacctcccttaaaaaagaggcttctgccccgagctcaccaaatttcccgttagtcttcattggcaatgactgcaatatttttaggataaggaaaggacagcaggacacatgtcagtgcttgatactgaaaaaatagaaaaatgttgttagctctggttcataaatggtatgctcagagtgaagtttgggtagcattttaattttatgttagaattagtcttgataattttctggtcagttactcagttatctccataaattatcattttatttgcaaatgaaatgtagttcaaattgcttaatttgaacagactattctttaaaatctatacagacttctcttagtacttgagtttatattttactcatcaaatggaccagactaatagcttttctagtactttctagttattgaaagagcccaacttcgtatatactgtgca

SEQ ID NO: 14494 - DNA, 3475 bp, Aquilegia coerulea
  Intron number 1 from transcript AcoGoldSmith_v1.001212m (l ocus AcoGoldSmith_v1.001212m.g) derived from phytozome v7. 0 (chr-ID scaffold_2; pos 9516740 to 9520214)
cttgtaattgcatccttcaattttttaagtgtaagttttccaactgctatcttgatttgttttcttctttttgtgattacttggtttcaatcctgagtaatctagtttcttgctctgattgatgaatctgtatgtttcactacatctttgacgattagtagtttacggaattagcgagtatatacttgggtatatgttatggttttcctttacagaattagcgagcaatctttatgcatttttctctctaatcatgctagatacaattattggtattgacccttcatatcattggtttttcaccatcatcgatggttagcttaatgttcaggtacaaattaaggtgtcccatccatggcctcattagataagaaaatagtttttgaaaaagaagtattcgtatttagccagctacaaacttaaaagagaagattttcttgatgatggaaagtagattctattattttgtaacttatgtttttcgaagtgtattgccttttctactgttaaattgtgttagcgttatacaaaaataaataaattattctatcattttataacaaaaaatatgtaagagcaatctgcttgggaagagccatattattgtcctttattactgtagatgttgtggcatgtgtgctattgtgctgtcattgttgttattatagtttttattcttataacattcttattgtcgttgttatcttattggtagttctttttatggttagtgttgtacttaattgttaatatcattatgtttgtaactggaattttaatatctttttttatatttagaagaggaaattcataataggtgttttattgttactgtagaacatgtcttgtcactaaatttaacagaatatgacttgcaacaattatagttttggagggagaaaatatataagatttggggttccgcattgcaccaccaaatttaacatgcgaaaaatattccaatttaatctgtcccatatagctgcctttttttttctttcttcataagatgttacttatattagtaaatcacgtccaaaatttagtctatcgcgtataaactaaactttcattgaagcatctaaatccttagaggctcagggtaagattcagtgcatgtataccatgtaaaagattggttgacttttgggcatcatacttaggaaacataaggaaaacacccacaccatcgtcatggcagatttatgttatccttatctttgtgtgatggagaatatgttaccaatttcatcttcttcttgcagaggtggttctactataaatattgatttcaattgggaattgatggcttcttagtgtagtggattctcttactttgctggaacttctttgggatttattatgaataagaatgtgtcttgttgtttagtgtatatgaattgtaaaatgtagtgaacaattgaacatgtaagttcaaatgtgaaccgtccactaggtcaaactggttttgaatatttgaaatcataaagtctattgagtgtgtttagattctatttgatttatacgatgagaattaaaacgggtaaatggtgattaagtctctctatcaaaggcaagagtgtaaatcatagagcatgatggaaagtaggaggagcaaataaattataaacaaatcaaatctatggttgacatcacacaaccaaagctggatttgatttactgtcttctctagtgaaaaccgaattttcgaggcatcacttttgtattaggaatatagtattctcaaggccactagattgacgtttattggttaaaatttgactactcataaatgcctaaacatatgttcctacttttggtggagttctcatagtttgaagtttagtcaagttaactgtgatttggacaagtctttgtagatatcttgaacaattaaatgatggatattagtcatgagttattaaacttcatataaatgtatgtcaatctggaaataggagagatgatgatgttctgtatcagaactgtgttagcagtcccgggagttataaccagaatgtaattcctgaacgatagacttcgaacaaaaatgtgtaggtatatgaactcagccagtgatggggtatgtaatgaggttttcaccaagcgattgtaggaacatgggatgctaaaccttctacatccaatatgggcaccaatataagcataaatggtgtgttaggtattttccgactgctttcaggatgtgatcagaggtgctaaagggttcattaaaatgcataaagatgataagatgtgactcgttctgcatatgttgcactaattgttaactttccgatcttacaagaaaaatccctctttataaaatgtctctagattggcggagaactagttatggccttatgatcctagttatttttccaaatttggcctttgggaaaatatcttgaagctcgaggcagcttctcccaaatgccccctaggtccaaccctcaattcaaacgaagaaatgcttataatctttctagaagacatataataacttcaagaaagattagaaaggacgttttatgtatctgaagaaagcaaaacgatcaacaaaactgtagcttttacctttctactgatttggtcaagctgcatgtatgagtacttgaatctgataagtgatattaagtttttgtactacatatacagtatatcgcatggcatgagtatattaccaagtcttgctagttaatagcttacgttcatagacaatgagtgttgagacactatctaaacgtagacactactagcaagtaacaaaagttttatgtttgagtttttgacaaagtgcatagatatccttcttcttttgcaaattattgtgatccgattcatacaaactttggtccttttgggcataccctagatgtgcaggggtactaaaacgtgtcaaaagtagagaaacatagaaagagtgttcagccaatgcttttacagtgtacacacataactacataaggctatgctctcccttcgcttatgtcgcaagggaggaattgatcgaaattttgtaatcaatctaatgcaaggaaaggattgactgaattagaaacattaatttgtattatatatatgaatagcaaggtagtgaacggatacaatcttcttaagaaaagacagaaattcgcttccgcgatcctttcataaaagccaacattgattgtttttttttttttttttggtatttagatgttaattgtagtatctgttccccttgttcttaatctatttggttttaagatgtccacatcttatttgtttagtgcaagcattcatctttagaaatcttcgtcaaattggatgtttttacaggtttatataatatacgtctttgctaaatctcgatgaggttttaattcttttgtctttggatgttgagatattatatcatttttccttatgtatatccttctcagcattatatatcttctgctaacaccgatatcatcatggtatataaacacag

SEQ ID NO: 14495 - DNA, 1144 bp, Aquilegia coerulea
  Intron number 1 from transcript AcoGoldSmith_v1.007209m (l ocus AcoGoldSmith_v1.007209m.g) derived from phytozome v7. 0 (chr-ID scaffold_14; pos 5144652 to 5145795)
ccttcaacaacgttctcatttgcactatcaggtggtacttttgctcaaccctcaaaccccctttgttgctaatttttttttttttttcaataaataaacaattgggttttgcattttaatggtttttgttcatacccattgcttgatttggtgttttaagtgtttgatctttgtctattttactgtaggtttatagttagggttttggttgtttgtagaatacttctttttgatgaatggactcaatcatgttgttgaatttccgcaaacaaaaaaaaatttatatttgtggaactgttggtttagtgttcaaatgaagagaattgatatggggattccttacttctctcagaaacacagccccaatgttagtgaacattttcttcggcattgtaatgactgtgatattgattactgaagactgatgggtatggtgtccaattgtcattttcgatcaagtagataagacctgtagcctcattgccaatgatattctatggtttgaactctgaaggtggtgtttatagaaactagtttctccgagctacaacattaagttgaagagtatatgatacaagccctttgactcaaagacacatggcctgcaattgcaggcatgttgcatgcttagacctagggttggaactttgtagaagaataactaaatcatcaattaagtatttttggatgtaaacaatactttgatttacaattttagttcaattttgaagatgctcgctctctttgtttgataaaacataaaactggaagttttagagaggaagaagactttccttgctttgctttcaattctaaggtcagatcatgtcataataaacattagcaatataaaaatcccccttgacaaaatttggagcttcattattagaattcattggaaattttattaaaaaaaaaaaaattatttcaagtgtcaattttagcaatttcatttacgaaaaacaacaacatagccagaccgagcaactacggacactaacccaaaatacttgatggcaatacttaattaaagccaaaggacactacccaaaaatatcatttgtatagtaaaggagtagacttaaacgaccttttttttgtaacaacaggtaggtgcgaccccagaaggggttgaggttccccg

SEQ ID NO: 14496 - DNA, 1377 bp, Aquilegia coerulea
  Intron number 4 from transcript AcoGoldSmith_v1.006957m (l ocus AcoGoldSmith_v1.006957m.g) derived from phytozome v7. 0 (chr-ID scaffold_67; pos 151413 to 152789 reverse strand )
ctactccacaccttggctcaaggggcaacaatcaggtaatcttgttttcctattaaacctcttgttcaccttttctgtttacataaaatgtggatcattgagtttaggaaaaatacaattcattaagagtaaggtagtgtttgtttcaacaagtgttcaacaataagtgatttttaagtggtggaccagggtaataataagtgaaaagtgatttttatgttgtttgtttagaaccagtgttcagaacataatggactattttcagccattttgaaccagcacaaatctcatgcttaattcatcttcttaatgcttattctaattttatgacaattatacccatatattatactttttattaaacttatgtccacagtccacgtaggattccttcttgtctaatctcctgagaaatcgagttgcactcttgacccttccatgctaactaatcataaatacataatctacttattgatcttcataaaataagatcctagttgtttgtagattgtggatgaaaataatagtcatagtcatgaaagatccattcacatatgttctttctttgaaaatccattagttatatcatatgcattgggtttaattattattaaaaaaaaagatgtatatagatgcaactaattgtctcgattttttaatatgtttttactttgtttgatttttttaaccatgttttttatataagtatttcttaaatgttcaattgttattttgtgatgtaatttttcgcaaagaacttcagatttcatgtttttcaaatttaaaatttaaagaatagaataaaggaggataaaattgtcacatttaaaatagtaaaacagaagttttgaaaaatgataaacaaacaactttttcagcatttagtcttcagcaatcaatatctagcattcagcatccagcattcagcaaccagtattcagcattttaaacaaacacaccctaaatctaaactgtctactttattttcctgatcttctgtagtctctttgtgttgtcaatacctccaaacgcatgccaaaagatcactaaaattaccacttattctttgtttatattctattcttttatttatttgagaattgactctagttattcactatcccctaatttgcaacaaattaaaattttctaatgtgttaggacatccttttctcagttatctctttatgacatagatatcgttattgttatcgacttatcgttgttacttggctttgttatcagtagatttttttgttctctattttaggactttgggaaaagtttcacaagtagaatttttttcttttattacttttggtgaattgctcttcatttgcaggttccattcctttttggtgtaactgcaattgaaaa

SEQ ID NO: 14497 - DNA, 1846 bp, Aquilegia coerulea
  Intron number 1 from transcript AcoGoldSmith_v1.008898m (l ocus AcoGoldSmith_v1.008898m.g) derived from phytozome v7. 0 (chr-ID scaffold_14; pos 5368996 to 5370841 reverse stra nd)
agaggctttctgctaaggaatcacttcttcttgctgtgagtaatacttactgtataagctttatttcttcattttccatggaatattttctgtggtttgtctaaactctgaggaagtttagttacagggattcaaggaattccattttcatggaaatttcttattttaaagatttttggtttccttaatttaagtcaatttagctcagtttccaccagtaccactacaaacctgcaaggtgcaaactgtaaaaactttatagtttgaatttttcttttgaactttgctgaatcagtacaaattatgttggtctctgtctagtattgtcgagaaacagctgcttatatcaacaaaattaatgtccctcatgacatcaacagaataagcatctccataattaaatgtagatttgaatttggcgtaacctttacaggaaactcagagtgaaagcagaagaatagaagcatatatgtatcgtgtgaatgtccataagacacaagcgaccacaattatgagatgtgatttaagggtgaaggagaccttgggaggatttttttataaccacaacaaaacacatgcggaatgatgtagttgttgcaaacttgcaattaaattctaatgctttgtatgggaactgtaaagggatgaaccagaaaaggagatccttcttggacttggtgtagattttcatccactttgcgagggcaagccaagaatcccaaatttacctctaacgcttaccaattgttgaacgtttcgaaacacatttgaagagaatattgtttcatcctcaccgaatcaaatcactgcaataattgtcaaacaaccaccttatgaaagttatgttcatatcaaacacaggttacacagtattcccaaaataacttgggcacagtacatttgggagctgacgttacttttttgactagtttattagtagataatttatcaaagagttccattaaaactatctaacagacctaaattaacttcacctacctcctatccttcgtgcctaccattggagtaaatgaagcatagatatgtaggtggtactgggattcaagaagattcactgcaacacttgtcatacaagaatggaagatatcacttacaaatgaaagatcgtaaaatgcaaattgtacttaaaacaatagaaactgaagtgttaagaaaagaataactgtgcccaagaacacactctttcaagataggggcaagaggatagagagtgggggtagaccctacaccaagtttctatctacaccagaaaaaagaaagtccttcttcggcttggcgtagaccatattttcttgccactgcaggactcaatggtttgataatgctggcaaagggaaggcaatatgttgaaaatatcacatcaatactaactaaactacttaagagtcatggactcatggtcacaggtcacatgaactgagatgagaaacgaccaattatttctatccttttttttgtactattattattgggaagcctgttttttaacgagatcggtaactcaaagatgcactgcctgggttcgaaccccagacctctggcatcatcgcccagaggtattacctactgagctcagctggcatctgcaattttctatcccttcaaatgttttcccatttgcataatcctttcttggtacatcaccactgtccgctgtcctatagaattgccttgctagtatacaacaacatcgatattgccatgcatcctatgctatttttgaggtgtcatgttctgtatctggttcaaagtcattcttcgaacgggtcaataattgtttatgaaaccattatttcagttgaaggattcgggaggatttgaatca

SEQ ID NO: 14498 - DNA, 829 bp, Aquilegia coerulea
  Intron number 7 from transcript AcoGoldSmith_v1.006897m (l ocus AcoGoldSmith_v1.006897m.g) derived from phytozome v7. 0 (chr-ID scaffold_12; pos 5864271 to 5865099)
tcatcattaagaaattaagagaaggttcttattttagtttcttctatcttttctacgtgttttaagtgaatctatgattgcatattctctctaagtcgaagttagctacaaagtcgtatgggtgggccaagatcttttatttttttacactagtcttgacctgtcattcaaagtatgtataggtcaaatattaaccttagagggaagtgggttattctgaccacaatggtttttttaagtagcggtggtatatgatgcttttacaaaaaaattaaaagctcctttaagagaataataaatctccaaaccatttgcatttcatgttacaaaaacagcgccagatatgcctatgtaagattgcaagcaatatctgtaatctgtgtgattacgtgtattctgttttgttaaagaaaaagggaaatggataaactctcatggggttttgtagatgttttttttcctttatatccttttgaataaaaccatttcgaattagaatcaagcaaagttgtggaggcgttatcatattcaagccaacttctgtccctgggtttgctgtcattgtatttaaaacacattgctcgctagtgtcaagaattgtctgcgaaactgcagtgtcatgcagtactcccgccaagagtattgtggtcacactggggacaaaacccttgtcagcaaatcaccttatttcactggttttaagtctgatttagtttgttttggctggcatagtgtttgacttcttttaatgtgtagaagaccctttcctgtagtcattaactgtcatgccatctatcatatgcagctgaaggactagtatttgggaaca

SEQ ID NO: 14499 - DNA, 3878 bp, Aquilegia coerulea
  Intron number 1 from transcript AcoGoldSmith_v1.003217m (l ocus AcoGoldSmith_v1.003217m.g) derived from phytozome v7. 0 (chr-ID scaffold_8; pos 644035 to 647912 reverse strand)
tatcttcttctggatcatctttctcaaaacaggtaacttctaatcaaatctctactacttctcttatgtgttttaatcaaatcatttctttatttatatatcattttcaatttgcgaaattaggatttttaccaacaattttgatggaaaatattactttttatgtaaatcaaaaataggattagtattgttaggggtgggttggggtgggatggggttgtttttcttttcattgtctctcactaatcattacggagtattattttaaaaactcactttcttagttgtgattcagtagaagagaattgtcaggttcaagttcgaaataggttcaacaaattgcccttatatcatataaatgcaaaaattaacataatatttgagcaacgtgtagaagaatccttctctcacaaagctgtagatttagtcatcgaaaaggagatcactatttacaaaggggatgatggactgaatcctgtaatcatagtaattgattaagaaaattagaaaaggaaggcattgattccctatttaaaattctacataatcatgtctacaacaatattgtttacatgtttggagatccagtgagatagaattaatgtttagaatttctacattaccgtcttcccctaatgcgagatggttaaaagatcctctcacgcatcagcaattcagcatacatgtcatactttttcttaaggatgtggttgaggagctattgacaattatgttgggacattttggtggtgcgtgaagggtaagggcctctttgttattgcttgggtggggagggggtctatctggtatcatagacttagctgtatgttttggcttttccgtcctgtgcttttaaatcgacttaacctttattttatttgtttatcaaataaaatatataccttcaccaatttttagtagtatagcacgtagttgcacaaagaaggagtgagaagctttctggtagtaggtacaaagaagcgaggtttaggaaatacactggttctttgagtctaagaagctctgatattgataatttgatacagacagatatatcaaactagaaaaagagtcttaagagataaagctacataaggtgaatcgggatttaggtagtcttttttcctcactaatcccttcttcatttttcttacggtatactttctaatccacatttaatgcaataaaggaggtgattcgtttgacatttttacatatcacttatgatcggcattctttgtaccttacataaaatatttcaatcatgtaggtgttctctctatcaatagtcgcaactagtttagttggaaaatccggattcattaattgtggaaatttatactattaaatctatggattattctgtttaagggaatttttctttttgtcattttagattttctgatttaatagattacatgcgggaaaaggataatcggaaaaaatcttagtttgatcattgcaaaattttgatttcgtagcagatctgaaaatctagtcaagaccccacaagagtcccacttgtgcgcatatgtttgtaaatttttaatttggaccggggtcacccttttcatacttttcttagataaactacttatcgttacgtaagggttaggagtttttatttttcgaactagatgtatcatatactattaaatctatggactttttttttttacatgaatattctttttttcattttgagaatctctgatatgagagattaattgcgggaaaaggataaaagattcatgaaaaactatttcgtgagtctcatatgtctgtattttgtttttaatttggatctaggtcatccttgattcctttcatactttttctagataaacaacttatcattagtgaagggctaggatacttgatttttttttttttttgaactagatgtatatgttgtgattttttatttttagttttcacatttcaggacattatttttgttgggatacgctattatgtagttattttatatgtacagatttttgtttatggatgcagcagtgattcatatttccttttagtttgttcatttcaagtcactactcgctgtactcttgttgaagtgttttattgttgagtttccttttcctaggcacaaaatgtcttaggtggtatctcattcaaagacaggttgagacattagtcattaggtttcaagcttatatggtgaatatttacattcaaagaaatctcccggacgaaggggattaggcagagcttgtcacgttaatcatagaatttaggcttcaaccactaaacaaaggccgactttttgtagtgacatagaattcctcaagagttaagagtcaagaccattcacttgtagtgacatatgtacagcgtgcacttttatgattgataaacccacaagttatctcaattatttttctcaatgttataaagggcaagttaaccttattgttaaatatttagcacagacgattgagagttaacagactcatgaaatgacttaaaacaaagcaatggagatgaaattaaaggttatggccctcctaatggtttatctatgctaaatctccgaactctttcacaatttcctttaaaagacaagcatgtgtaatcgtattgagtacttcgtagtatgtgtagacacctcaaaaaatattaacactaaagaaactgtgaagctttgtggataactacttgacagtcttgacatactcatcatccttctgcctataaatcaccaaggttttaagcttagtgacccaaaccgtctccatgggttactgttcttgattaagtaggaagtagcaattataaggagaagcattgattccatcagtttgtaaatatacagaaaaattagcccaaggatcacagcatttggatgaacttgatttaggtcgtatctagtcaaataaaaatttgaacccaagataaaaaaatgaacagtgtcagagaagagagtgagagagagcttttatagttattgtgagaaagggagcattgtatgtggaaaagaaaatttcttataaggttttgctatacagcgatgacaatgtatgagtttatatgggaatggttgggtccaagtgtctaacagaatccagggcaagaataatgtttgacctttggttatagtgcaaggatatatatatagggctttaggcgctcccaacacactcccaactggaacttctctggttaggtggtctaacgttcccacttccacttttgcactcgcactcgctccacgatctggtgacttagtttttaggaataacgtacgatatttacacgagggagccaaactctttgctgaaaccccgattctacctacacgctgccttctatttgtagaggtgtccttccaagtcatcatctgtagagacaaattcctttctcaattacttctgagctatctgagttgcctatcctaatacatcctccatgcagaattttgagatgacatggccgagggctaggaatgtgcttatttcaattttgtgtgtgtgtgtgtgtatgtacgcagttttctgttggattcattgtctctgtaaagttcttttgctatttgttcttgtctctggctagctcaataattgaataattgtagtaaaaagaatacatgagaagtttaacttttaaatcaataagactttgttggcttggactaatggggggactagagtaatacaactagcacctttactgagtgttttttcgatgtatactatcttcatatttaatcctttataccatatttacccataacttgacatttttttgtttttcttatcattgtggattattataattaagctggtcttgcttaagtaattaaatcagaattcattatgtaatgcagagatcttacaagcacaatcaaataacag

SEQ ID NO: 14500 - DNA, 1406 bp, Aquilegia coerulea
  Intron number 1 from transcript AcoGoldSmith_v1.004003m (l ocus AcoGoldSmith_v1.003995m.g) derived from phytozome v7. 0 (chr-ID scaffold_13; pos 2225486 to 2226891 reverse stra nd)
gagaaaacagttcagtcggaaactatcgattcaaggtacaattcttattagaactcttctgtctgttctttatattgttttgttatgtttaatgggtttgagatattgtactgagtagtttagtcagcataagtcattcttctgtagcctgaaagaaatgatggaagatgtgtttaagaatgatttggaatgttgttattgaaaaattgacactgttttttgtactttgggttgagaaagtttgctgggaggggattgggtttgaatgtgtcatgttacaggtaaggcttgaaataaaacgagattgcattcatacctcattaatttgtcggcttgttgcacgggaggtataaggtgtttcgagagtttgaacagaatttagtaggcgaacccactacatactagttaagatgatacaatcatacaagttctatgaaaactttgccgacttttccaaatactgatgttttatatctaagacagatatattaggtaatgggatacaccctagatttgctctgcactcttttgttttctacccagtggagtcttagaaagaaactagaaacagtcacaattgcaaacaatggagtagcttgcaaccacccgagtcaaaataatttgttgtcatttaggatcagcttggtacgtggttgtacccaatacttattatatgctttccactttccagtgtaaatccaagggctttctttcaaattttcggaaactttgttctacatactgcatacgtagctatattagtacttattttttataagacatcattagatttcatatatagaaggtaaattctatttgttgtcccaccccttgtatatcagcacttatttttctgtactcgtctacttccttaatatattatattgggattaatgcggcatatcttattttatttccaaaacagactacatttattttctttttgaaaatggaaaactttgttgcacctgtgtatctacatttatgttctttctactcttcaattgtaaaaaagaggaaacagaaagaaaaacttgtatttttttttcacgaaggtgtccaatgagacactggtcaagcctttggggatggacctcaagggcatggaattgatttcaatgggacatttgttcaagggatatgttgtcaaaagtggcaccaaggctgccacagaaaaattacaaagaaattatttgatcatactaccctattcgtgaaaaaattccttgatgaaaaagtgttatatttgtttaatgttttcctcgaacaaattctctcgatttgtaactgctataaagtatccaccattatgaagccaatttttgcgagttgacctttattttattcgattttatctctgattccttatagtgctcaagactggaaggcaagactgaagataccac

SEQ ID NO: 14501 - DNA, 945 bp, Aquilegia coerulea
  Intron number 3 from transcript AcoGoldSmith_v1.004606m (l ocus AcoGoldSmith_v1.004606m.g) derived from phytozome v7. 0 (chr-ID scaffold_16; pos 2490984 to 2491928)
ttttcacccactggaaattgtcttgcaaccacaaggtttgtagttgtttttttctcattgcttcatattaaatgtagtacttcccttatttgtatttgttttcacgttgagatttgttattcgtatttgttgtcaaataaatagaattggcttcttgattaattgatcagcattcttgtactttgttttggttcaaatatgtttatactttgaagcttttacatgcttagagtaacaggtatgtggggttaatgggttatgccttcaatggaggtagttttcagactgaacattacagtttataaagagaccaagaaaacgatatgaacatcagattaaaactagagtttgaagttattgcactcatattcagatattcttatattatacgtatataacctgctatgttaatgtacatgtttacctcctaaaacataaatattctgtaaatggtatgatacacacaatttctacgaattccaaggtcctttccgcccatatccccttctatccatgtccaggttcgtatctgtactcagaaatcaaagttcgaaatgtcatactcaattttacttttttatgaagtattttacaaagtttccaggtcattcacatgatagattgatagtaaaacaatttcgtcaaatatgctcaggcaggggacaccatgtgatttgttatacaatggatttcagagcagcaatactttcagtattttgtgtagttgtactgggaaagtgttgtgcttcgtcttgatttagtataaagtatttcgagtatggaaccttgctcattcatttaagagaaaattaaaattagaggtcaactggttgtttgctttgatgcctaaatacattaagtttgaggattactttggaggttgcacatggaattggaaattctctgatcttttctgtttaatatcttgatgtagtatcgacaaca

SEQ ID NO: 14502 - DNA, 1573 bp, Aquilegia coerulea
  Intron number 1 from transcript AcoGoldSmith_v1.009544m (l ocus AcoGoldSmith_v1.009544m.g) derived from phytozome v7. 0 (chr-ID scaffold_4; pos 6154028 to 6155600)
gattccgccgctgttctccgttcctttcactgtaagtactctctctcgatgaatcattcaaagaaatgtgtttgcgattgttctgattagatattgaaatcgatagttattgagttgattttggatgaattgatgtagttatagattctgaattcatagctaattagcttctaaacaggaatttaggtttttggaagaattagataatgtttgtgacttgtgagtaagatctgatttgatcttttagtaaattcaagaaattataaattattctagaagtaatagcatgaaatgtgctttcaagttctaatgctgatttgatcttatttgtttgatttttttccgaagatattgaggataactgagttgtaaaataaaacgaattttggattagttcatgcactacttcacataactaactaaaattttctgttaattatgtgctggtgaggattaattgtagtttaattgtaagatgagatgagacagaatagcagtaatgtagatcactagattgaagatagggttgcatccctttcacaaagtggagaggtcgcacgttagcagctgattgtttgataacaagtttcctcatgtaatgggtaaagggttccctcaaccccacttgccaatcggaaaagaaaaaaaaaagaaagaagaagaagatagagtgagaaaaatagagaagaggaatgcgagagattaaaaagggagagtgcaagagaacaaaaaagacaattcctttccttgggtttgttaaattgtcaaatagctgaatagaaaacacaatgtcagtgtattacattgcctgtctaggcgtctaagtgtcgaaggtcccatttggcattgcttgaaagctaccttttcatactggtatataacagaattcaggattagtgattccttccatacttcaatttgaaaagatttacatttttctgcacccatgttttctgctatttttgttattattattttttaatgataaattacagttacacgtttccacactggttcgggagaatgggtatcatattttattccaaaaatgcaatacttttagttaaataatgccaaatggggcccaaacagaaagtcaggaaagaggtagccagtaggttgtaggattaagcaccaggagttatgtcaaacatattctgatatgttatttatgcctttgaattgtatatttgtgcattattttatttctcatgttatgttcagtttgaattatacgcacaggattgagatttagttgtatgcatgttgatcctacatagaaatcatacttttgagttttgtgattttgactcttaatctcactcatggacattggcccaagcgtttatgaatagaataattgttggttttttgtgagacactgagacatcttcccacaagaccttcccagtctatattgtaaacctgtacaccatactacggtcaacagttcttcactttttcctcccatcttttttgggtcagtaatacattgctaaggaaaagtttataaatgcactttaattcttatatgctactgtgtgtatgccaggttctgtaggtacagtctcac

SEQ ID NO: 14503 - DNA, 2713 bp, Aquilegia coerulea
  Intron number 1 from transcript AcoGoldSmith_v1.003777m (l ocus AcoGoldSmith_v1.003777m.g) derived from phytozome v7. 0 (chr-ID scaffold_5; pos 2336880 to 2339592)
ggttcggtctctgggtatcgcagaaaaaattcctggcaagttttttactttaattatttttcattcatctagtgctagttattgtgatattattcttatgcaagcttttgttgtgcgtatttgttttcgtgtttgcaatattttcaacttgttagctgttcagcacataaacactgtatgtttattacgaatgccagtttcaatcttagtagactgtagacatcagacattccacatgcatttgctttaatagcttctgatttgtcaaataaaaatgcaccagttgttggagaagactaattttaacatatcttatatgtcatagcatgccatttgaactgcactatatgaatgcaatttaattctatagggttggttgcttgctttatgacaacgttgtgaaaaatgtacttcaatttttcgttttctctcattattgtgtgtattgattcatatgatcggtttgaattaattacataccatgcagacgattatgaaatatttttattttattttattgatctattcttaagatttataacatgtacggaaagttttgattgttttttttccttaaatccgtattaattgatcttttctaatcaataggaatttgatatccataaattcgtgcacaaagtttagccgaagagttttgatctctgataactctacttactatgtaggctgctaatgtggcactttctgcatagagactgccacctagggtaggagagtgctctgtcagcatttttctactttaatataattgtagaaacttggatgccacgacggtattgggtgatttcccttttttttgtgagggggaaaaagaggggagggggtttaccaaacatccgatagataataaaaaaacgttatccacacgcaattttatcatgatttttttttttttttatctattaacattatccatttatttcttttctttccatgtcactttttttgttactttataacttgcctatttcaatgcttggaatagtaaatttgcatattttctttttattcttgatggtgggaggtgcacctgtgctacatactccttaagttggagtgttttatagcatagctgatattcatttaaaaagtgcataaatttattttatgaaagccttgctacaaccttcacagatttttatgtggtatatcatatggaacagaggtagtgactatatcattgtctatgtgaagagatctgtatgtagctttagtactgcacatgttccttaaggtggaccatgttattagctaacttatacaaggggcgttaaggattaaggtggttctgtttcgtaggtacctagaaaaatagaacccttatctttgttctttttgtattaattctcttttccccttcttcaaaagtgacgaatattatctttttggtttggtatatagaaccatagtttaaaatatcgttttcaggcggaattttgatttttaaaaaacacagctttatccgtgaatattctttttctgtgtcggattggagaggttttcgggatagatttagttattttttaatattaaaataaatataaactgcgctctttaggttcttcttccctttttcagtaagtgggtccacaatcccataaaaacacgtaaaaatatatctattccttaactattaaatattaaaataaattctgtcctttggattattcaatctaacggttgttatctaacggtttatgtctccttttcttttttcattctctttcgatctaaaattcaagatttcgtcataaattgcaagagaaaatttctctgagaaacaagaacgttgaattccattgaattcgatcaaaattgaaaaatccgacaaatatccggcaaaattcgaacgatatgcgatttctgtaacaccggcataattagtcggatattcaggaatatcctcgatattttaaactatgtatagaactgctatatcagttctagtatttctgtttatacagtttgctacatttctacatgtttgttccactttgttttgaatatcaaactatccacagcgtgaacatattggttgttttcattttggtattttgaacccataaactgggaccgtactttgggtcctggttatattatttattacagtgacaccccttatgttacattgtaatatgcttttatcggtattggtggtgttggagagatcacagcgaggtagttctcaagatgccaattccatatgaaatgaaatactagcttatgacgcttcaaagatttaaaatctttagtggtaacgagatggcaaagatcttgagtgggaacaaaactagagtgacctcagtacatatttcacattcttgtttataggattcaatttccttatatcattttttgtcgttgctgtcttggtctgatgcaatcagttcaaattgtcttttttttattaaagctggttgattttctaatccataggattttttttcatcaaaataagcttcaccaggcggtgaaggtcttttgtgtcagcggcattactaattagaattggcgcttcatcataatttggtggatcttataaccccttaaagtttttcattttttgcgtactccagtctagttacaaaaataatccaatgctatgcatttggttttgatcctgcatcagcctgtctgatgagatctgcaacttcatttcttgttacagatctgattcaaaaacttacaagta

SEQ ID NO: 14504 - DNA, 1983 bp, Aquilegia coerulea
  Intron number 1 from transcript AcoGoldSmith_v1.006353m (l ocus AcoGoldSmith_v1.006353m.g) derived from phytozome v7. 0 (chr-ID scaffold_11; pos 2847951 to 2849933)
caccaagacatccatctttacaaatcaacgccaaggttttctttctctctctctttcaatccatctgttaccaattgagtttgagatttttattacttatatgaatgaataatgatcttggtattattttttatttggttatttcttgtatttattgggttttgctgtaattctatagatttcgactctatgatatttggtagctattttgattgatgggttttcattacccacccagatgtaaagatttaagtatttggttatattgagttcatatatatcctttcgattttgatttattcagacccaaataagatttcttcgtgtttgatgactttttgaggaaatggtttttttcttacgagtatttcacagttagaatgatcaccattcaccagtgtctgtttgattcaagttcgagaaatagattttcgtggaaatctcaatttcccatgtttaattgcatggtaaatttttaaaacgaaatgataagttaaaatgttgggacatattggaaatgaatgatgatgaactctcactaaaaacatatctaagaatcagaagactcattgaacagttagaggagtttacaatcaaacacatctatagagaatgcaaccaactcgcagacacattgccagctgagattcctatacaaaactattttgatgtagatcttagttctttctctgaaagtactaggaagattattactgatgatgctataggaactatgtataccagattgtaaccagctcttgggcctattttcactttattatgaaatgaggtaagggacctcaaaaaataccctgcttgcctacccccccccaaaaaaaaacatatttacatgattttcataataaatagagcactatagtcgttttaaaaaaattctattatttcccgaatatttgcatatggtaattctatttcctggtaaactgttttcctgcccgaatcaaacagaccctaaagattaaatcccataaagaaatgtacaattttctgtgcaaagaacctttgtatacaacattcttccactttcttacgtgtatattgattcgatttcactcttgaattgagataaggatggataactggaggaaatgaagtaccagcagttacccgagtcagcctgaaaacagtgatcattactgatgtgacttgtgcaggtcaagtcaaaatactaagaataaggtatcattatggaaaatgtttggaactgaaggaacggatgaaaaccttgggagttgggactcatgaggtgtagggattataataattgtgatattcatcatacacatgtgtcaataacctgttacatataaaatcctgaagctcttgatcaatgtgtcacggaaaggcgtggaacaatgatatatacaagagcttgattataactagagttcttaaagttgaaattttctatttcaaagtatttctggttcagtttagagtaactacctataaatttgtgcacaaatttttgttgaaacttgttatagtagaagatcagtataacttttcttcactattagctttctctgagtgcaggccattgaagtcttaatgtaggatgttagggttatcttttgattcatgcagagtttctgtggaaaacatgttttggattttataaagctgaaattatttttactgtaagttgtaatagatttcctgacaaccgaataaattgattgactagttttggagtttggacatcttgtgtgaattttgttcagcctcttgctacaaaccccagatcgccatcaccatcattgagtttcgaatataactttgtcctcatttgcatctctttgtttgaattttactagcaatatgattactttattcgagggtttgattgcaattgatattattaagtttctcttttgctgctaatttctatctttgacccttgatttaactaattatgcataatctgtaattttcatatatttgttgggcaggaacctttca

SEQ ID NO: 14505 - DNA, 2672 bp, Aquilegia coerulea
  Intron number 3 from transcript AcoGoldSmith_v1.012171m (l ocus AcoGoldSmith_v1.012171m.g) derived from phytozome v7. 0 (chr-ID scaffold_15; pos 2092326 to 2094997)
gggtatgttttgtttatctttgattctattgatcaatttttgggctttaaatagagtgctattgtttgattaatattttgttataaagtacatcatagcttctgattttgataaacaaagattttttgtagctaattgtagactagggtagttttaaaatgagtcagaattgagtaaatgattctcatttatagacatttttaattccactattacgaattccttgtctcatcgttagtcttgactctgaactaactatcgaaatgttgggtaatgacacacaaggtgattggcttaccacacaccccgacttaaaagaaatttataggacagatattggtatcaaattaagtaacatgaacactgagtggataacaatttaggaaaaaatctggtgacacgaatacatgtactatactaggcactggaatttttaggttcacctgtatctaggtgattggctaacaaagcctgactctaggctctgacccgaggcctagatgtcaagagttttgcttctttttagccctggattggatgaaacttgacttgtgtcagtaataattgtgtacaatcttcaagttaggtacatgtttgatgtttttcccaaatggaattgtgttaagattccattgagttaatttataaaaaaattctcattgttaatcttctgattttcctaagaattttgatcatattctgattcatcaaatctccgtgattcgacatttctctttggattgatctgagactcgtttaatactcttagatagtgagtttctctgtcttctcaaagggttcctttaattgcttttgggaataattttgtattggacctcatgtttgtggatctggtagaaagcaaaatagtttaatactctaatattctgattcacctgtttctcactagcaccacccaatggtttatttgaaacacagtccttgttttgcatccgatggttttgagaagagttagatgtttagtcgccgtctgtaaaacgtgtcacttaggattatgtttttgaagaaatcttcaacatcacttttcacttcttcgaaaaccgactatccagtagctcgtttgcaactttgcataattatcgttcttgtcatatttggtcatcaaaacttaatatcccattgaaatttgacccatcaatcttggggtgttattcttaagaagaagggaaccaaagaagctataagtaaaaaaatagaagagtgcccctaaatattgttagagtttgaactatgctattaatttccttcttgaaatagtctacttgacatttgttccaatggctttgtacaagtgctagtaaactcccgtgatacaatgtattccttctatttaagcatcttttaatgctatacacaaacctaagtttgatcaaggtggtgtgataaagttaagcgtagtaatataggtttaaaacaatgttatacttaggggtgagaatttctgccgatttttcgatttttccgatttctgatctgattttttccgaatttggaatggattattgtagttccgatttccgaatttccgatttccgatttttccgataaaagatggaatggaattggaactacttatgtgattccgatccgatccgatttttccgattgttaatccgatttgtttttccgattaatattccgaaatttccgataatttaagagatttaactattcttatttttgaaaatatatgtacatatagacataaaaataatataccaagtttaaaatcacatgacaactcaataacaaattataattagtctcaaatcttaatgttatcaaatatcaatatatcgttcaacaaaaaaaataatgtaatagtaaattattggttagtttatacttccgattgaaggtccatgcttattactcggatcaattattttcttgttcatacaattatattattatataaattttatagcataattgagttttataaggtgctatactcaagaactttgatccatcatattggggtggtatgttactatgttagataaaaacaccctaataagcaaatcaactcattaaaaagagtggattttcaagtttccaaaatggatcacgtccactattttcgatttgaaatttcaatcaattccgatatattttcaagttggaattccgaattttttatgttggaattccgattgatccgaatttatttttttccaattttttccgatatttcgaatatttccgatattccgaaattggaataaattttgttgttccgaaaaaacatggaatggaattggaagaaattttttgattccgatttccgatttattttttccgaacatgccatttccgatccattccgtccgatttccacccctagttatactttttgtgatgtgaatcagcattgactacaattgcattagtgtttgagcctcatcatttttgtgttatttaattcttgcgatagtcagttgctcagtttactttgaagttcgggaaacacctatacattgcacacacagtttggctttaactttgctttatttgctaggaatttagttgttttcttttttggtgaagatcgcgactatttgagtatttgaatatgcaagaattaatcatgtcgtctttatgtcattggtttataatacatatttttttctggctctatgcaggtccag

SEQ ID NO: 14506 - DNA, 2676 bp, Aquilegia coerulea
  Intron number 2 from transcript AcoGoldSmith_v1.006493m (l ocus AcoGoldSmith_v1.006493m.g) derived from phytozome v7. 0 (chr-ID scaffold_3; pos 1507319 to 1509994)
aaaaggtaacttgttaattaattttgttgatgttactgaacatgagttcttacaccactgttttgtattttataccttcgtcttccgtgcttttttagttaaataggtgttgatacccccttttttcataggactgcattaacgcagccacagttgaaggttcacaaggaagctccaaacaattaaacagtaatgtgcttgggaggtttctatgacatctaaccaacccagctaatgattatcaagaacaaaggacaagaaaactagactgaagatattccattgtaacatgtaagcaaaataaagtaagtaatttattaaataacaggatgatatgttatcttagttacttgagagcccaaccataatgtgtttatataggcattacagagaaaaacctgcattgtgaaattacagataacccatatgccttgtacacccaccgctatgacatgcgatatgtatggatacaacatgagatagacacgccaatacacaatttttaaagacatgccatggatacaccaatatacaatttttaaagacatagaatgataaggatacattgggatagattgaacataatacataaaaattctaaataatagctaaagaaaatgaatgaaaaaattaaaagaagcgaaatggatcaagaagatgaaaataggagagatatgctttagctaatggaagagaactcgagaagttaaaattgcaggagcaaatttaaacaatcactatatcagagagtttccaaaagtataggtgtctgatacatgtctgacacagatacgtgaactgtgtgagagtatccttcatagcacagtgctcctaatcctaatagatattcccaataagccaatacccttgctcaaacctatattttcaaattatatgtttacaggtaaaattggagaacaaaaccaatcattcaggtgagactctttgaactgaagccaccaagcggcacaccaaccacagaatccgccaatcgtcttcaatgaactgagctgagcatgaaccaagtaaacaaaggaactactaacaagaatttaataattacataattataatactaagagaaaaagggaaaaaaaattgtctttcaccaaaggggaagacaaaagccaccatagagccacaatgaactaagatcaatgtcaaattagtgagaaaaaagaaaatggacgcaagctactaatcatcaaaccaccaaacaaataaccaaattgggctaaggatggggttggggacatgggggcaactaaccaatgtcgcctcaagacagaccaggtggtatgggaggcaatagacaagcactagaaactaaaacagactgcacagagagagtgaagagtgttagcataatccttcttctcaagcccataagagtgcagtgtaggttgctcccagagcaattaaacttaaaatcgtgccaaattacatttctggacacacaaaggcgactgtcaaactcatcactaggaagtctattacacccaagtgcaagaattatgaagaagtgaagaacgctggttcaatcatccctctcaatcccatggagcgcactgtgaaggtatccctggacacagaatggtgactgtcaaactcatctccactagtaaagtataatacttccaaaacacaacaattctaccaccatatagttgccaaaggaacttcagtcaagtccatcctaagagttgcaaccgtaaaagtcgacagctatccaatttggcaagcggcatccctattctggaatatattggactcctattctggaatatattggacttagtccgattggaggagagatgcactctgaaaatcgtcattagggcttagtggtgtatttggccacctgaaaatggttatacctccttgaaaatctctcaacagtggaaatgatgtagaaacaaagtctacaggaagaacaaaggaaaataaatattagttcaggttgattaatcaaggtttagttgtccatttcttgttccagtgggctatatctttaggattaacagattcgaaacgattgacaaacccctttgacaacagcacgctgattggctaatctttcctacatctggaaactctattttgttcttcaatctgaatatagatactttatattgtgatgatggtttgtgttataattatctaaattaattgaaagcgtaaggtacgttaataacggattataagtgatatttgaagcaaaaaaaaaaaaattactgatggttattatatttgaatatttgtttaagttggactatcacccacaatctgttgcatccttgatacaattaatccataagctaatataatttccccactttcaatatgtattgtcctacagttaaaactctttgattcttcagagtcttctgcatgagcataactagtatagacctcataaaatagtaagtctttataatgatttatgttattgcctttgttttttttgtttgggtgaaaataattttttggtttaggttagcgcaatcgaaaaaaaatcgtacgctaaatgtggattgtgtatagctttctaatgttagtttgcagttccatgccagttttactatattattaatcacaacttcacactagaccatgactttgattgcatttgaaactgcagttgaaggaagaattgtgtgaggcacagaggaagct

SEQ ID NO: 14507 - DNA, 1250 bp, Aquilegia coerulea
  Intron number 1 from transcript AcoGoldSmith_v1.005603m (l ocus AcoGoldSmith_v1.005603m.g) derived from phytozome v7. 0 (chr-ID scaffold_11; pos 2387497 to 2388746 reverse stra nd)
attggaactggtcttcaggttcgatttcacttcatttctcatttcaattatctagggttttttttttcttattcggtactgaaagcacattatccatgaaagcctagaatttgtttaatttctttgttttatttgttggtgttgtaataaaactgtatttatattatggatatataagtcggctgttcggcgtcatggatcatgtttgggtggtaacgaaaggttgtaatatataagcacatttttttaatggttttagtttaaaatgatgaatgacatatcggaaaaacaattctattaagacttaaaaatgcatttcaatatcaaattagaaccttattattgaatctttctaattacaaatatgcatattactgtgtgtagtgtatagtatggacataaacagagcaataatttcaaattagccctaatcaagaaagcttaacctctatactgcatatcgtgataagctttgtaccttttacctcatacccttgacgcgtaccaaagtgcttaataatggtcatcttgaagatattactactttgtcttcacaagctcaagtgttagtatgtactatttaagaataaacgtgttgtgacctatttaacaaaattggatgaagaccatgtgtaacagtatagtgccttttttgtaaggatctttacagtctgaatattaaacattggataaatgcaatgatctttgtgttatctttatattcagattacttggaacaattattttgacgttaacacttgccaaaactgcacttctcattagtgtttacttggtgttttgtcgttttacagctacatatcacaaatataatagcatgtgatttcactactctttttgagattatgaaattgggttttaattgagatcacccgcaagacctttctagataagaattttcacatgcaggtttgatggtaccaataacagacatacaaagcatatcaagattatggtttcatacaatttattaaaaatttcgatttaaacaaaacatttggacgtgcatttgaatggaaatcagtaatcactaagttgtgctttcagtgtcataaataatgctataacatttgtgtaaatagaccttattcttgctagaattctctggatttacttatgagtttgattatgtcaattcgagttttgtattgtttgtatatgttcatgtttgagtcattttaaagtatctgaagctcctcaaaacatgctcattgctcagggagttgagtttt

SEQ ID NO: 14508 - DNA, 2355 bp, Aquilegia coerulea
  Intron number 9 from transcript AcoGoldSmith_v1.014388m (l ocus AcoGoldSmith_v1.014388m.g) derived from phytozome v7. 0 (chr-ID scaffold_12; pos 382474 to 384828 reverse strand )
ttgtatttcgtcatcaggtacattacataatactggttctattgtgagaattttcttgttcgtattttaatttttttattttttgaattcatgaatgcagtgatttgaacttttttgttttaatgtacggcaactacgaaataaagactcaaagttgtcaatgtcaaaaatttataatactgtaaactcaaggacatgtaaaatgtcacaacacaccaaaacgcctgctcctggtagaaacttatggttacatacttacattgttttgtcattcgcatgtgaagcaacaaatgtcataattcgaaatatcgtttctgggtaaaactaaattattaattatatagtttgctgagtttgtcacaggtttcaatatatatttgcagttttgacaaatattggtaattttaataataataaatggtcattccaagaaagggccatcttttgtttgatcagctgtgattaactacctatttcatgaataacatcatttaaaagaacatattaaaaaaggatatgttgtgaccctcaatgctttttttttttttttttttttttgatgaagttaaaatttattgaaaagaattcaaagaatacaatcctgaccagaccacataaagcgtcgtcaggttggatgcatcagtaaggtacaagtaagatgcattgtcaggttgtgaccctcaatgctattaaccttatacctatacctctgcccgtgtacctgccccaaaaggcagttgttgcagtaatatagtatcagaagaatctgaatcaatgcttgattcgattttcatacttctcatgacctgggtagagcgattatgatcatgtaatgtatatgtgggtagtcgtgctaggcaaaacaaggttgggacttgtgagcttggccaactgtagatagaggtcattccccatcaacactcatctgtgaggcaggataagtggaatggcccagtgccattgaaggacagatattcgtgtgtttctctaacttgcagtaaagggggttcagtaaaaagtgcaccggaaacaaaatgtggcctaaagaagaaaggccagtctgggtggaaaaatgtggaggttgatccctatagtgtggtggagcatatgggaagccagaaatgccttgatctattaaagtaagaaactgagaatggaaagatttggtggtgacaaccaagactacatgttggtactggtgctgggagatagctccagaaaaaactttcattttacagagttaatcacagactgggaagtaatacctagggattgagtgctgattgtaacctcctttgttattgaattctattcggccacacaaaaaaaaacactcgtccggtgtgaattaacaaccttgatagacacattgacattatgcataagattgtgtatcccacacctgtatagttgtaggaagacagttgtgccctttgctccttgattatacgaacggaaatacatctagtcatattctgctcctggtagtcgtagctctgtagatgtgtaagaactaggaatcctccgttcactttggcactgctgagtcagtatcactgtttccgccatggctgtgtatagtatgacctgtcaattcaaatagctctgagtggacctggagttatcatggccatcctctgaatctaaccatatggtgtagcacatgtactacgcttatggtttttcagatttgaacttaagctgtgggcaataatttttgtatggtattgtatatgctatcatgtggttaagtataaacaaatgaatttgtaaatagatttatatatcaggatttctagcaattgtcaaacatctccaaaatttcgacgaaaccatgtattgattgcataatcaaaattttgttcatatcggcttctcaaactaatcttattataggctttccagctgtccagcctttgattttactgttttaggggtagtagtgctttttctttcaatttgtgttcgtgtttgttagtctcattctgaagttttgcaggaagaataagtccattttgtctaatagtgattgatgaggcattttagttagtattttatcttttgttattctaatttcgagttatttcagtatcaataatcataaacttgtttgtcaaaagtgataacttttatatgggtgcttttttcaactacgtacttcattttatttttattttttggtcgataaaagaaattttattaaattcaaactcattatgatcttccttgatactatcatgactcttgtttttaatgtaagtgccactttatttgaaattaaatcatatataaagtctgttgctaataatagctattacatgttattgtagattataaacgtttacaatcaagaat

SEQ ID NO: 14509 - DNA, 3738 bp, Aquilegia coerulea
  Intron number 1 from transcript AcoGoldSmith_v1.000745m (l ocus AcoGoldSmith_v1.000745m.g) derived from phytozome v7. 0 (chr-ID scaffold_24; pos 2071370 to 2075107 reverse stra nd)
gatcacagcacagatattgaggaggtttgtaagttcttcttttcctttttctttttcctctgaacaatatactcaattatgatgatgcagttctgtactttttaggagttagaaattgctcttactttcactagtctagcagttttaaataagacggcataatcaatgttttcccgcgaatcataatcagtcaaaacacttgttaatcgtcttttataatcttgtggatcaattctctcctcctttttggttatcatacagctacacattcatggtacaagagaactgctgtttgatttgtagaaattaaaaacttaatctgcatactattttaattttctagtgacttagcgacaattgtgtttagtcatgcttttaggttgacacatgatgatgattatttatatatttattttcttgagataggtaaacatcccaattcccaggtagaaagcccaacccaaaaggttatgtacataatgaattatagccatgttttttttgaggagataatctccacaccaagttgataaaccatacaataaaaccaaattaatcatctcattcatacgtttctaaccttgagaagttgttgtcaaggttaggaattgcctgaccgtccactctttcttcaatttgcaccactctattgagctgatgttttgtgaggatgatctctatggtggcacaatcatctgcactaaagattttggccagcaatttattttgttaacccactattgggccaggatgtcttctatgtttctaactccgatgtaaatgattttctgtgttctcatctcttcttgtatcttagatgggatgccatggtttggatttgaatttaactttcatcttcttatagtatgatggaggtttaccaagtaaatctgcacaaagacgagaatggatgaaaacacttaaatgcctactcagtaatagacaatgctgcaatcaagacaaaccttttatttaaagtcagactttaaggacaagttagaaccccccagttagtacattgtattctccaatttacgcaaatgttcgtgagataagtgaatggtttttaacaataaaacccattgcacaaatctcaattggatcagatgatctcaattcttgaatatatgactcgaaactttagagcattcccaatggtaggttttaaatcccttttaagaacttttagtaaaaaacacttgccaatggttgatgttaacacacttttcaagcaaaatacttttaactccttggcaaatttgccaaggagttaaaagtgccacataggattagttaattaattcaaagttaaattttataaaccatgtctttgggaaagtgaaattttaagcttttaacactcaaccattggcaactctaaaaccttaaattacttttaacatcaagtctatcctaaaagcttctccctctctcctatgtggcacctctaaaagccttttaccattgggaatgctcttacatgacatcatagacaaaccattactcttctttaaattgaacgccgagtggctatgaaacaatatgtatgcacggggtgaaagctgtagacaaggtggtttatacaaagaaaaataagaaatggagtactttaatgaatgtcgaaatgtcgaatataggcccctaggagaacgctatcatctgaaaaggtactccgtcaacatcttctcgaaacaaataatattcaagatgatatgcatgaagtcctaagacaaaattgcagaacgtttcagttttgcttcggctatctgcttggaattgggaaagggtaactgtttacaacattgttttcccaaaacaggtagactaattgcataccaatatatgaacccttttatgatcaagaagtgatggcctttttgacattgttaatagcagaaatgcttatgggatatttgcccaattaggtagtagattcgagtggaataatttttggtgtcttggttttttttatcacaatggcacacattttgtaaggggtttcgtgggtgtacgtgagttgtgtgtagtaggaattagtatctagctaatcttcccttttcagtcttgatgtattaatgtgctttatatcaatgaatacctgatttatcaaacaaaaaacagtacaaaataaggaaactagtataaacaaaaagttctttctctacaacattgtgaaaacacatttcttccctttttacaactatgtagtatgcttattgcgtgcttgccctcttccttaacgtgtattatatacattatacttgaccatgcattgtgtcagtaagtaaatgtcaatgaaggtgtcattgatgaaaaacttaaatcccacaagtgaatataaacccaaatccaatattgtcgtccctctaaaattattggtgaactttgtgaaataaacctggacatattgagacgtgccaatgacatggcccattatgcacatgaagttttggtaaatatatccatgtttttcattcgtacaaattatcttgaggcatactttggattacatgagcctgagccagccctttaaacaagatagacacccgatgacccgatgcatcactatcactcgttgctttagcaaactttgtgcctggtgtccctcagataaaagatagtagaacatattctttagatttcatgatagagatgtcattttaatgatctcagtgcttgcttttgaaattcatctttacagaaaagataacatttggattaaaatttgcagttaaagatcttttagggtggaacgcaaacaagaacactttatatttcttacttgtggatattctgtatcaatgctaatatcaaaactactaataatgactctttccgtgaaaaaatgacactttctattcacagctgttcctttgaatatgaagatgtatcccaaatttcagtcccatattatgatactataggatatttggaatctggcttttctcacattcttataatcccttgtatttgctgattgcaccatcgagagaataaatctcaatttccaaataccaaatttaatgtgatacttcatgtgatagaatcagataaggtaattggaacattagtcccagttattggatatcgattccccaaacctccattttgcctccaaaaccatcatatcttcttatatacgtatataatgcctgttgtatgtcgtaatattttgatttaccacgtgaggcaaaagttacgacctcttgccttaaataataccacaactttaactaagtgatacaatgttttgtgaaaaatactgacaaattgtccatctatgtgcctgtgacaagtcctttgcgaagaggttgggtgacttgggtcgtgctcatgtctttgaattttagacacacacattgtcatactaagaatagtgtaaaatctcatcctagttagaattctattgtatgtgctgtttacatcttctaacactacatattgtctcttacattaaactagtgttagaaaattaggactagtgtatgaaatcgagtcatcctatgtacatagtgtttgtagtcatgtgtacatcttttgacactaaaaattgcctcttgcataaaactgatgtatgaaaaataatagtgtcttacaccgtatatatattcttccgtaaaactagtatcagaaaattagtgtaatcctcatgatggatatcacaaatttggttacccttttcctctttattgacaatttatagttgccacctttcattttgattgttaacaggaagta

SEQ ID NO: 14510 - DNA, 2149 bp, Aquilegia coerulea
  Intron number 1 from transcript AcoGoldSmith_v1.003761m (l ocus AcoGoldSmith_v1.003761m.g) derived from phytozome v7. 0 (chr-ID scaffold_28; pos 2357458 to 2359606)
ataagatttcgggtaattctgaactttatattatgttcattaattccgtgttattaataattgatatatcttttggaagttttatatcggacggagattatatattttggcaattttagcattacgataaatgtagtgactactcttataattcttagaaatacatactttcaatgcttaaaatcgtatatagaaaacaccagtgttgacgtgatttgtttcttatgacttaaacttaatggtagttgggtgtgtgcgcctgtaaattatttaagagcaactcgggattgcattacaataaatgtagcgactacttttataattcttacaaatacattctatatttctatgcttaaaatcgtatatagaaaacacctgtgttgacgtgatttgttgcttatgacttaacttaatggtagtggggtgtgtgcgcctgtatgttaattaagagtaattgggatattgtgggccgtctgcaaatctggagatgcaatcatttctaaataggaaaacgttacattagaacacatgattgtgatggtgaaaggcactgcctgacactggctagcaaacttgaaggaaccatctgattataggttccaggaacttatgtttgattgggacaccttactatgtagctaactagttttcacttttaatttctctcttttcagtctgggtgatttttttttctgctgagttggtgtctctgtaaattcattttccaaccaacaaaagttcctagttatatatgaaaaaagtaagaggtttgtcagctgtggtttttacaaacttaatttagacagatcttctctgctgaaatcctgatagctgtgtcggtgatgttaatgccaaagatgaatttatttatttctctacaacttgcttgttgcttcttatttttgtttctctagtcttccgtctaacatcatgtttcagctcttatctatactgatgctcttacagttattgtttgaaaaatgtgaagcttcatatgttccatttgattcctgggttattataaggctgcttccttgtttccttaaactccggggaatagattctgtgattctctgcttgcttgattactgcccatgttcgtgtgattagtagtgtaatattactagctgatgtatggctaatagtgctgcatatttacaagcctctcaggtcgttggttttgtgttgaactttacctaaagatgtctgctatagtgctatatcgttgtattgacaaagaagtacgcatctctttcgatctatagtataaataactgaaagttcctgttcgatagatttttttggactagtcggcttggtctacaggtcagatgctttacatctgctcctattggggtcgcatctcccaactggtcaaatcttgagttttgaatgcaccctttttttgtctgtcaaccattgcagcacttaggtaggaaggacacatcattagacatttaattcttctatacgctgtactattgcgtattttctccttcaacgtttttgaacacttcctggacgtgagggtacatttttcgagatgagaattgcctcttgatggagatttatattttaagctgcaaatttgattgagaatgagctgggttcagattttagagcatgctcttctaggattgttatcatctgtgtatatcatttttccttaaactttaataaaaagccagcttacaaaatgctgttgtttgggagtatgtctctaactggactaggcaaaggtgattggtagattttagttggggttgtgtgttccgcaggccgccttggtaggttgtcatactatcaagagattcaaaatcaaatgaaagattaccggcagttctaaactacaaaatgattgagttatgtattttctcccctcaaagcttgacattgagcataatcaatcaaaatttgtgctacatagttattctaatgatgctgtttttctgcaactgggacctagaatttaaaaaaatgagacttagtttacagttgaatatattttgtagttaaggacaatagaataatgatatagaaaagttattgtacagttgcatcttgtttaggattctcttgtgatctgactccttttattatttgattttctgcagattatattcagacactcagtagcaaggggaagcag

SEQ ID NO: 14511 - DNA, 1386 bp, Aquilegia coerulea
  Intron number 1 from transcript AcoGoldSmith_v1.020183m (l ocus AcoGoldSmith_v1.020183m.g) derived from phytozome v7. 0 (chr-ID scaffold_16; pos 3389893 to 3391278)
aacagaggtattattattctctctttgtttcattttagttaatataaatccatctagggttttagatctaattaaatctttctgagttattagggtttaagcagggttttcaatctctagaaaaatttcccagagaaagagtacttgattgattagctctttaattaatatctaatttgttgaaatgagaaattttctagccttggctatgtatggtttgtttgctgaaaatggagtaaaatttcaaaaattaggttaaccttcaattcaagagacaaacaaaatggaatgaataagtaccattgcaatagcgaatggaagtatctacgtttcgctgattaattatgtatttgtccactggcaaatggcaacacactacactaactaattaaactcacacagtagagaaattccagctacagtgattctactgctcagaatcattctggattaatttcagaagggatatgattgtgcatttgtagagggtatccactactaatcgtgcttacatcttgttataaacttccatttccaccgaaaaaaggattaaaaaattcgaccacgaggtaattgcaaactgttggtgggactttgttatcttccatatcgcttctaatagtagtgggaaactgtgaatacacaactctattagagaaagaagggggtgtgctcgggtatgaaatgagccactctgagttgtttgatagattcatggagttgtagtgtaaatgtatgcctctagaaaatttaagaagataatttcatttgtagaaatggtttgtttgattttgttataagctcctactgctctgatttgtcgattatttcttcatcccacccatctatatatgtatttttctttttagtattccaatatattcttgctcttgatcctgcaattttttgtttatgtttttcaagtacttaagacatgccatatgatacaaagaaatatatttctgcaaacttcttcaaatgaactcgaaaaatgaaataaaatttaaccttggtaccgatatgtaatgaacccagttgtaatcccgttttgactataacagatgtttatgctggggatagcatctggctgtattaacattactcaattttgcagcatcttgtcatgttagatattctgtatcaacataatcatattagatacccttgtttcaaatgttatcagtactcaacttttagaagtgattaagaatacaattgtgtatagtagttatccgacggcttttctttttgtttgtatcatgttttcctgccactatgatgggcatcatatcttctgtttcaactttaaagtagtctaaacttgtaaggtaatctcttgcaatttttgtaggttcaaagcaccaatcccatcaggattacttggaa

SEQ ID NO: 14512 - DNA, 1264 bp, Aquilegia coerulea
  Intron number 2 from transcript AcoGoldSmith_v1.016225m (l ocus AcoGoldSmith_v1.016225m.g) derived from phytozome v7. 0 (chr-ID scaffold_15; pos 422802 to 424065 reverse strand )
cggagtcgactacatcaaagtatgacttcttttatattggtagttcagttgattctttttagtaagagctcttttagtgtttccaccttggatcagaccttttcccaacacactgcagatcaacttctatatcggtcattcttgttgttttgcttcagatctttttgttcaaaagactaaatcattattcattagtaccaattttccgtcaacagtgtgttgtgtgttcatgtatgcaattctaaaaatggtgatttaattaagaatgtgtttttttagtacaaattttgttaaacatgttgagtaaagtgagcggaacttggccacaccccacagcttcaagatggacagatggtgatatacatgatttccagctctgtatgtcttttcttctatattttgttaccctcctatagattttggtttaatttgaggaatgtgtttatacaaggtgtgaagtcttgctttatagcataaggttgcgtaggttaatgtacgtatgacaattttatcatgacatttgcaaaacgacagataaaagaacagtatccagtgggttgtgtcattcaatggtgaatttgtcgagcaccgtgattgggtgtttggaagctcttagaaccaaaggaagacgccaatttctgtttagacatgtttatggtctttaggaggctataactgacatcttttggagtggattttgctgatcaacaggaccaacttttagagttctttttcttgcatgacttggcgtacatcagaaacatattacgtaggcaagattcagagaatattgctctaattcacttataaagtgcctcatttgacttaaatgattcaatatttgagaatctcccaacctcttcccctacacactgattgaaactggataaacctctcttaattggaaatattgcttcatctaggctgttcatttggattctttttgatgtactcttactgtcaacttagaatgaggtgtgtgggtgtgtgtgtgggtggggtggggtggggggggggtgtcaaatttcgcatttaccactggtggggtattgaaagaactctataaataatcggcttttcttttggtatgtagatatgatgttgctttcctgctattccactctgacatacccaactgaataaaggagaatataattatgtctcttagatacactctagaggatttgttttgataatagtgcttggctttttgtcttttttcttgacaggttgattatcaccctgattttgctgattcacgttg

SEQ ID NO: 14513 - DNA, 3226 bp, Aquilegia coerulea
  Intron number 2 from transcript AcoGoldSmith_v1.008856m (l ocus AcoGoldSmith_v1.008856m.g) derived from phytozome v7. 0 (chr-ID scaffold_25; pos 1504154 to 1507379)
gggtatttttgtgtgtaagcgaccacagataccaggtgaattttctaattgcttacttaaacatgtatgccttacatccatcttttccattaggatataactcgtgtagtctcttgagctacagctgctctgctgctactacatcattcttagtttccaagctcggtgcttttgatactagtaacaatcaggtttgccacaattatattaaaagaatggcaatcacaccgaaacactaaataaggtcacaaatactttaatctttggtcatgaccctaaggatgcctccactttgataatattatgaagattgagtcttacattctctagcattacaattctatcccagaagtgtctcaaaaatagtgcgagaacaagtgaaccatagtctcatcatctataaaacacaatagggaatcagatccaaaccttttgcatttaagttttctttagtctgcaatctcccaaatttaagcatgaccagaagaagttagcttttatcgtaattgagccataacatagcacacgagatcaatgtttatagtaaatgaagatatatttttcttcataaaaaatgttatgaattgtgtgaatgaattgtatgtgagggtatatgagtttggtgaaagcgaaggtcattatcttgaattttgcttccctttttatctcaattttcaatttaaatactttatttggttttgatacattttgggatgcatatttttaccttgagaaataaacatgttgcacatttaggcaaccaatattttatttgacttagttttgtcaatgctggcttttacttctgtgtggagtgttttctttttcatctcaagaccactgctttcttgttcctgaataagtagatcctttcactttcattacaatatgcctgacggctcgcgcaacatgctctacagttgctgcagcaacatactgagaaagactagaccccccccccccccttttgaaagatgacaatctgaaactaatgaaagagattttttttttttttaaatgtaaattgctagatattttctttcatgcatggatgatgacatgattctatagatgtttatgttggatcctgttatagtcgtctcttaggctgtgtttggcagtttgaacaaagtaacattatccatgacttggttggttgtgttttagttggtgtttggttcattaaaatggtcgatacttgatagtttgcttaagtgatacaatacaaaaacataaatacgtttagcaatccagatgaggagaaagttttgtattcccccactctttaggacagggaagtgagagactatgtgggagaagaaaggaatgatgatggttacctacttaattacctctctagaatttacctgctgttcgtttttccccttctgaactcagtactcggcttcttctgcagctgctcttttttctgtccccctctttttgtttacccctccccctctccatatctatgtcctttttttaggattaagaattaggaatatacaataggtcaatacgtacagatcaaattagcatgtcttgctctttaatgcaagcaacaactaagacttattctctcttcaacaatctccaccgacgattcaatcaaagcgacatctgttgctttagccatcttcttccctcttcaggttcttagttaatgatgtcatgttagaaccctttccttcatttacctgttattttcaagtaaatagtttgaactgctattctatcaacatgtttcgaggtacctttctactcctctttaattactagtgttgcctacatcactgctgctctttcgaatgttatcttattctcaactcttcaagtaggttagggtgattaagagtttatagagtttgatttccttttattgtggaatgtctttttgattacatagtctggtagtcctgaataagtagcaaagcttgcgtacttagtatatttttgaagaaaattttgaagggtttaaaattctactcttgacacattctcactatgtgcatgaattttgttctatcgttagattttggttctactgttaacttcttttattctactgttagatctcatgttagcagttgattaagttaagctctaatgacgagagcatagtctaagaactgattgcctcttttattctctctctgtttctgtctctctctctgcacattttttttcttcttaatttggtgatttaatacgttgcgaagaagggatttcacccaaaaattgaagggttttgtttggattttgacttttgagtattttgtaatgttgacatgctttttatatgaatttatgctattgaacactctacataatgccgtaatgtgtgttcatggataggaaaataggaccatttatttagtttgagttttctcactttcatgttgtatttgattgcattattgataaaacagttctctggatatagcgatagtgaatttgttgttttggtttgtgttagttaagcacaaagatttccgaaaagtagccaatgcaatactgctaagtgctactacttcccctcttttcaggctcattagtgaaaaaattggatatcagctaaatttcaacaactccaattaacgtgagaattttaaattcaagttattaagggaaatttacatgttcattggagctatatcaaaaacttggaaagtgattttgaagatttagcgaaacttatttttatggcctcaagtacataaatgatatttggcattggctgatattgacatgggaaacattctaccaaaatcttgttttaaggtccagtgtacaggttaacgtcgatattttggaattttagtattgaactactaagagaagtttagcatttccacctggaattggttatttcaagtataaatcttgttcgaatgtgttctaataaaatttgaaatgaaataaacaatgcatttacatgtggacttgtaatgcatgcctttgtcacactgacatatgggaaaggcatgggccatgcctcaggcatactgaataccaacatgagttaaattctattttcatggatggatttggcaagaatttccataggcacatctagagggatatacttttgtgtggctgagaagtgccaataggcatggtaaatttttggtatagataatggttgttattttttttgatttataatgttctgtcctgcttgcttttgtcagaggcttaaagcttatttaagatccgctgaagattt

SEQ ID NO: 14514 - DNA, 1274 bp, Aquilegia coerulea
  Intron number 2 from transcript AcoGoldSmith_v1.023351m (l ocus AcoGoldSmith_v1.023351m.g) derived from phytozome v7. 0 (chr-ID scaffold_18; pos 4342328 to 4343601)
attggctgaacagtgccccccttcagtttcaccaggtaactcctctatatgtataagttaaattaaatacttgaatctgtgagtagaagaagaaggcgaaagaggtgactttgtgtatgtgatagagaaaacagccttaatgatttttggcctctctctttgtcttatatatgtataatagcaatattaacataaacctaaaacaatcaggttggggcgttgcccgccaaacctccaaaacacgagcactttggtgtccaagggaaattggctaccatttaacataacataaaagaggtctagaaatattatttaggggttttggcatcatttcaaatcacttatatagtattaaggaaatctcatatagtatcttcttatttcatgtttgcatacagttccccaggagtttctttattctgtgtttttattgtattggcatccactgagctatcctcacatgggacattctaagcctcaagatatacgaaaaccttcatattgtttattattatcttactctcagatattttgttaactactcaaaatatttaatacaatggtggaggacaagtgtgctacaaactgcactgcaaagtgctttcggaatagtaaacatgattcttctaaatacagactcatttattggaaccgatttttttctttttatatttgttttatcagaaaaagattattctgctatttgttaaagtcctgattataaggatatgatttccttgaaaggcttggattacataactattttaagattgatggaactcaaacaaatattggactatcagttaagccacaaccggttccaatgaaataattggtcatatattagattagtgtatcaatttgatgatcctaatgacttatcagttattgatgtacagattcgcctcccaaaaaaagagtacagattctaaattataaaggtcttggtggataaacttacgaagccataataatattctctaataagcttctgcatatttacttgggattttggctttgttgggcgaacccagttgcgtgcgtttttcctcttttgagaatgttgaggatgtgaccttcattttagaaatgaaagttattgatcttttagatgtgaattatattgctgtttcacccttctctttcatttggtgtattggcagatgcagtatatacaatagcttggacctgttaacaatagtcgaaactgattttcttggattcctattatttcgacaggatctgaaaggaaaggtggttttactggacttttg

SEQ ID NO: 14515 - DNA, 1334 bp, Aquilegia coerulea
  Intron number 36 from transcript AcoGoldSmith_v1.013152m ( locus AcoGoldSmith_v1.013152m.g) derived from phytozome v7 .0 (chr-ID scaffold_22; pos 1480597 to 1481930)
actatcggtcagcgaatattagccagtcctcttaggtaaactcttttttcctagagatgtaaggaattcatatcgctatatagctttcaaaatattattgatactaaaaatgagtttgtgaagttaaataagtttattagacatcgttatttacatggtataataccaaaagtcacaaaaattctttgattcagataacacgtatttggtgaaatatatatgagaactctcctttatttataaaagaaaatgtatggaagaaatttcagttttgtagttattttggcatttgcccccatcttttgtattccaaagcatttgtttaaatccatagaatggactcagaaatgactaccttcatttaccattcgttgaaaatttatttgttgaaatacctgttcctttcgtgttagtttgctacctaacaaatcttgtcagttgtttgccaccatagtaagttagcactccttttgttttcttatagtgactcaatagaaactttatctggtttgtttagtcaataaagactccttttgtagatgctgactttttcccataaacttccatggtttattattatttttcccaagactttgaatctataatttgattcaactatatgcttctgttgagtatcccccccccccccaacccccctttggtacccctaaaagacttgcccccccccaaagttcaaaaagggattggagctaagatgagtgatctacaaaagtccaactgataatcacagtgatcagccatcaaatgaagccgtcactgtggctatgtagcaatggttccaagaggactcattcaacttctcaccaattttgtccgtgcataccactttcgttcaaaaactaggttgacctgaggaactgcatacagcagtcccaactacaaaagatagttggaaccagttttttcggcccaattccttgaagtttaaaactgtcatgccccaacatgtgaaccatcaacatcaaggtgttggtatccatacatgtaccaatggaatgtgtgagaaagggaatttccatttgaatcgccatcaccacggttgtatgcagcacgcattgctgagaccgccatgactgcttatatcaaatagttgaaagtcaaattttagtttctagtttctactttcttaattgagaggcacttcgcaaggacctttctgtttttatttgtgataaaagatttttgttttgcatcaaactacaaaacaatattgattcatcaagagcctacgcaaatgatttgttgacttaggatcttcattgcataattttctgatctttgttcacttttatctcacagagttcgattccatt

SEQ ID NO: 14516 - DNA, 1142 bp, Aquilegia coerulea
  Intron number 2 from transcript AcoGoldSmith_v1.011396m (l ocus AcoGoldSmith_v1.011396m.g) derived from phytozome v7. 0 (chr-ID scaffold_1; pos 6292681 to 6293822 reverse stran d)
gcgatccgaaaaagaatttcaaacatgtatgtcaaattacatctgtctttttatcttggcattgagtaataatgcttataatgttgataagaatttcgctcaatttatatatttacagtgttattttttgatctgcccgaaagataaatttcattaataacaattaattagtttgttgagatgagatattatttttctttagtatgaattgaaaacatttttattccaaaatcatacaaactcgcaacttaggattagaagaatataaagtaatgtccaaatcaaaatctctgacctggtttatattaacaaagaacatactgttatgtaacaagcttgtgggttagtgggtacagaaagcggtctagtgtttgtagttagtgggtagttttatttaacattatgtaagctatataaaggcattgtaattaacatttgaattatggaatgaaattattgtttgaagttaggcttactagtctgatttagaggtgattccctcaatagaatcaaatcagaggtgatgggttcctcaataaaccctttctatcatacaatcttagttgattgtatcacatactttcttcaaaacaaattccaaaccatgaagtttatctcacctcttttatatttctatgcatactcataaaattaacctttttggctaaatataccaacatgtttatttatccttaaatttccctatttttacagtattgtcatcttgtattattatttcacggaatagcatttattctgagggtctgaatatccacaatttcattgcacatttatttttttggctggttatctttctggtccacagtaaaaatttatcatatgcattcctttctctaattggatcggacaatatttttgtgctcaaaagtcatgttgtctgtctgttcaaagattcaacaagtgaaaagaacagcattcatgcaaagattttgcatgaatttccacaatttcattacatcggatacttttctttaactaattatctttgtgctccacttttgaaatttatattcattatttaatgggatcgagtgagatctgccaaccattttgggcttaaaagtcaagttgtctgtatttgcacagattcaacaagagagaagacgactttccatctttaa

SEQ ID NO: 14517 - DNA, 1896 bp, Aquilegia coerulea
  Intron number 6 from transcript AcoGoldSmith_v1.002874m (l ocus AcoGoldSmith_v1.002874m.g) derived from phytozome v7. 0 (chr-ID scaffold_3; pos 98977 to 100872)
tttcacgactggcaataggtgatttggcaacacaggtaactttcctattactaaaatattccaagaatatacatgctatgtacaaaaatcttcagtcttacttgctgtgataaaagaggcgttcacagatactatctcatgagattttgctttgacgaggttttatgggtttctttcccttttgaattctttcttcacaataaattacgattctgatgtggttcaactgttttctatattccctggtcagtagccttcgttatcaaggcacatataggttctttgtaaagtttatacaagtgaggtcaaactgaaagatattattacttaagaggttcattagaggaattatttgaattgacttttgcctatctgccgatggacacttttattttccatccatggggttcagctgctgtgaccttgcaaggtagcaccctcattactttgatccagcaaacttgaatatatgttatcttcgtgtgttttgatattgaagatcccccagaatctttgttgacaagctaaatcaaattactttttcaatttttaaagaaaagataatccttaaagcctaaacttttttgatgaccagctcggactggcatgattggtacttgatgtctctttttctcaacccaccattatttcctatgtgagactaaatggaactattcaagatggaaataaagttgaaaaatattatgtagtggagatgaagagtagaattacagtgacccaactgctttcattaacttaaaaaggaaatgaacttgaaggttgcacaaggattgggagaacagagctaagtgtcatgtgtcagtgttcatttaagttgggtgcaagagcaggcgactcaccagttacttacccaagaagcaacttgcagatacccaaaatgcttcaaaattccagttgttcatgtgatttagttgctataaagaacaatacatattcaatatttaattctgagtagttaaatctaatatatgatttttgagggtttagggtgttgtaatgttctgctatggatctcaatccaaagtcatgtcacgagagcatatttgagaaaaggttttagtcgcacaaacttttgatggagtttgcaacatctttggtggtgattcgtgtactacacctacaaagatgcaacaagcaaatttataattttttgaacaatactttgataaatgtgcgtgtaaaccattcacagctgttactgatttttgtaacaaacataatttatgctgaaatggtattgtctgatgatctttcaataattaagacggagaatgctgaagactccaaagcctaatgaactcgttaaggatgatttaattgcttcgacacactttgcacttgttatatgaccagatagcctacctatgatttagttgcttcaacatagtttcttgtcttggatcctcattgacaagttgcttgttagttgagcatttttgttttggtatatgggtgaatggtgattattatttggtgtttatgttgggtagatttgggctaagttgtcggagaaagaagagttgtagaagggaaatctgccaatagtggggtacttaggatgggtctaatgaagaaaaaggcagaaatcttctttaatattggaaaattccaagtatgtatgggcttttgggttttctttaaagtgcctaccttatggtggaagccaagctgtattagaacttatgatatctgctcctgcttggtgaaacatttagaatatgctttacaaacagtagaatataaaatcgaatcaatgctttacaaacatggttagcatatgttgtcaaggtgttacctcgtaattcttatttaatttacattattctgtttgtattttcagtattttgccgatcgagatatcttctgtgctggtcg

SEQ ID NO: 14518 - DNA, 3165 bp, Aquilegia coerulea
  Intron number 3 from transcript AcoGoldSmith_v1.007999m (l ocus AcoGoldSmith_v1.007999m.g) derived from phytozome v7. 0 (chr-ID scaffold_44; pos 1575442 to 1578606)
gaatcaattcgcataacaaggacaatataaaagaggtaagtagttcttattgttcataagagccatgaaataagaccatcgttcatgtttctttcatgtgtatcattagttgttacttatatattacaaaaattacccattccttcaaaactctgacattcagaggcatgcctttgtctttggatactagaataggtttgcctcagtcctctgaaattctctatttggtaagtaagatgaaattagcagaccatatttgcggaacaataagcaaagaattttcttcaatgaattggaaatttcgaatttgaataattggtcagtcacatataccagcaagctgtaatcttgaattaaagaaactatacttgagcaagaaagcagtgattctatctaaaaggttgttgatttaaggcagcaaaggaagctattatgatataatttgaggcttcaggtgtttgacatataacattaaaattccagaatgatattttgactatccttcattccttattttcatcttatgttgagaatgaaaaatttacggaacactgcaattcaatggtataagtttttttttttcttgtgcatgtgtgtcaaccattattttctcaaaataccagtattaattattaagagtttcaaaatattgtggtcagtgttttaggaaacctatagagccacatcatatcttcccgaaactgtagatagaacaaattctctgtactggtagctgcacattgtttgttccatttgcataaatgcctcgaggtttttagaagtgtcactgttcagatccatcatattgatggaagtgtgcatgtgctctgggtttttgggtaccaactgaggtcacaattccctaaaacctagaaagtaagtaaaatttcaagagaaaatgtagtaccattattggcatacagcacgctattattgtggaattgctattggcagaccaagaaaatcaaacccactccaaaaaggaaaaagaaaatggaaaagaaacaagaaaaatacatagaattatccccaaagaaataagaactaattgacatttcatcaacatccatcatgttgattctgatttaaatctgacatctcataaaataccaaatggagcaaaacatttcgttcattagaggccgacagaaaaaaagggaatgagatttttgggtcgatgactgttagagtcgatgtgagagattgcagcagctactcgagagagatttgtacaaggaagaaggggaaggagccaggggtgacaagaattgtaggcaagagagacatcagtaagagatggagaagcaaaacagagggtgacaagactcaagaggaaccatacttggattgaagtggcagattccactggaccagttcggaatgtggacgataaaactggaatgctgaccaagggaaagggactcaagagttggattttagattttttgattttgttttgttttgtttgcgatggtgttcttttagtaatgggtgtatgctgtatggtgttaagagcgcgtgaagattagtttctggctaatctgtacatgggcttcttgatataatgcgttggttataatcatgaacacatgttattcataaacaaataaacgcttgctggcgtcattcaaacattaaatttctctttaaactcttgtaacagagatactaatattaagttctctttaaaattttatcaaatacgtaattcttccacagttatattcataactacgaacccaccatcataaatttgcttagtatcctatgaatcatgtaacatatgattcacccttggatcttcaattctgttttcttgcttgttaaatcagttcaatatattataaaagatggtgcggtaaaggggttcacacaagccttacaataaaatcaattatatcataatccaataaaacttccccactgtacataagcttatctaggtgaactcccatgactgtttgaaggtgggaacccatgccctcgaggatatcatttgatcttcgaattattgctccagatgcaataagatgatactgtaggtaattatctggacatttgattatatagagaagccaaggtggattgttagaggcaaaagaatgttcttgtcattgtagagaggtcataaagagtgtttaggccatgaatctgcaatatcaatgtgtcaaatgtccactcattcagaaattctagcacatgagagtgtgtacctaagggaaggaggcgagaaaaataatggtgtttgcttcctttcttttcatttgttggagccagagaagatcaatcacccatattttgttcattgacaatgttacaattctttgtaagaagtccattttttaggatatctgtacttttgttggctgtaacctattttttcaagatactgcagctctaattcaaatttgaatatattcattttactcccatcttcgtttttttggccaaacctaatggtgcatcatctgtccatatatgataactctgtactgatgattagttggggtcggagaagatcgatcacccttattttgttcattgacaatgttacaattttttgtaagaagtccatttttgaggatatccattcttttgttggctgtaagtctgtaacctatttttccaagatactgcacctctatttttaatttgaagatcttcattttactcttgtcttcgctttcttggccaaacgtaatggttcatcatgtgtccataaatcataactctactgatctgaagaagtattatctgctcttacaaatatcatttaaggccatgggtacgaattatgtacatgcaagggtgaaggtatcatgcctcccttggcttccatccagaatgccatgttttgttagaaaccactcctagtctcctagagtaaaaaaattgagtcatctactgcattcttttttcttgccctttcctttttatgtttcaaatatagatttgtttgtgtgtatgtgtgtggaaaaatctctttatccttatcacatgaaacctactatagtctatattgagtcatcattactttgcatcttcatcgtatgtaacattaggcatgtctaagtctttctgatttactatccttatttaatcgtatcgattgaaacttacaattgtatagcttctcaaatttcttcaagctcaagtccgtgaagt

SEQ ID NO: 14519 - DNA, 1172 bp, Aquilegia coerulea
  Intron number 4 from transcript AcoGoldSmith_v1.004928m (l ocus AcoGoldSmith_v1.004928m.g) derived from phytozome v7. 0 (chr-ID scaffold_2; pos 175596 to 176767 reverse strand)
aaaaagtaaagaaattcgtaaacttaattagttttcaaacgatcacattttggccccagcttggtacattgtgtaatcattggtaatttgttgatgttttgtaaagttttagtcaaataggagatgcaacagggccaccacaaaaggaagaaaacttcccgttatgatctatgacaaattctgccaaagcatagagcagactttttccttgaactctttgcttcctgcctctctatgtttatctccagtacagggtttgttccctctctcaattcatatattggtgtctttcccacttcctctatcctctagattatttttcctatcttaaattgcagtgtagatgcgacaataggttaccccatgggtgttcttataaagatacatgcttcactgatttcgaatctcttaaaacaccatctgaatgaccttgtaaatcggaaaatctacaatcagaagattagatttccccatttcaaacaaatcgcatcgagaaattatatagagatttttatctataagagtcaattatcaacatacatatcaaggtgtttcttttcttctatgacttcaggaattaccaaatattatgttgatcaaagctgctctttcttcaatcttccctatttcaaatttgtgagggtttgagggatttgtctttattgcattgtgttggaagttattgtaatagtagtgacttgtctaacacactactagtagtgacttgtctaacacactactagtagtagtgacttgtctaacacacttctttcattatatatgcaagttatgtctcacattgagatatatagctttccaccctaatattctacttctagtataattcatcttttatacttctagtcattgaaagaatctgttattgtgccactgtttaatgcatagaaatattctgataaattgagacttctttggtagtttctgtaatttggatcctccattcttccctcccttcttttctagtgatcccatcccggttaagaaatgttcaattgatgtattaagtataaacgcaatctcattccaatgccgactgcatttgtatattcaagcagggccttaatgtattatgttgttagctatagttttgaagtacttctcatgatttgttttgatgaacagagcatctgctatcggccagaagtatccaa

SEQ ID NO: 14520 - DNA, 696 bp, Aquilegia coerulea
  Intron number 1 from transcript AcoGoldSmith_v1.020688m (l ocus AcoGoldSmith_v1.020688m.g) derived from phytozome v7. 0 (chr-ID scaffold_14; pos 943800 to 944495)
ttgacaaaggtatgtgtaatctcttttgattttctaaacgatcttttcaattatgatctgaaattagggttttttttttgtttttttttttatcgatttcagtcttaattgatgtattgattttgcagaattttttttagggttttgaaacattttattgaattgacagaatcagacttaagaatttattgttaatgttgtaattggtatttaataaagctagaaagagtgaaatcatctaattgaaatttaggtatatggaatttgaaaattaggggtttgtttgcattgttgcttgtatgatttattatcccctcttgttgtcgccatgtttagatggttttaggaatacatgttagcttttgtcttattttaaatggcgattttgtttttccctgagagtttctgattgcatgattcactctgtattggggcaattgagatttagcagataagcatgtatcatgtagctatacttgttaacgattacacattagtatgctttcgcagaatagcagtcagcttcattcccacacaagaattgcagaatagcagtcttgcttgatttttttagaaattacataaaattgctgcatggcttattgttgtaataatctaatgtatgtagcttgtccgcaactatattatgtttttggtttttctttgaacaggtgttgtgaaatccaagaggccact

SEQ ID NO: 14521 - DNA, 2309 bp, Aquilegia coerulea
  Intron number 2 from transcript AcoGoldSmith_v1.013339m (l ocus AcoGoldSmith_v1.013339m.g) derived from phytozome v7. 0 (chr-ID scaffold_91; pos 143474 to 145782 reverse strand )
tgagaaagaagaggttagttgatgcaaagaagctttttgagagaatcccagagagagatatagtttcgagtaatttgggaccaaggcaatattcgcatcagcatatcaaaaagttcacattggatttctctgaatctaataaagtgggatttggtgcgtatggtaatgtttataaaggtcagatttctgagtgtgaaagtagctgtttaggtactggtagaaaaggatgtcctcgaggagacattcatggctgaagtgagtaccatgggcaatttccatcgaagcttagtgaaactgtacggttattgttttgagcgcacaacgtaaaagcacttgtctacgagtatatggataatggatcattggatataattttgtatgaaaacaatggctgtagtatagagtgagggaagttgtatggtattgcaattgagactgcaaaggggcatgcttatttgcatgatggttggcatgagaaaataattcactatgacataaaggcagctaatgtgcttcttgataaaaatcttttccctaagatttcagattttggattagcaaagcttatgaaaagggaggtggatgatgctaccatgacaagaatcagaggaaccaatggttataatgcccctgagacatggatgccagcatgcatcacgagtaacttataagtgtgacgtctacagctttggcatggtgttgtttgaaattttggagaagagaagcaatgtgataactggtttcctcaactagtttggaacaaatttaagaaggaagaattagaacaacttataacagactggcaatactgagaaggatacagaaaatgcaaagaaattggccaaggttgcttttaaaaaaactataccttccatgaacatagtggtgatgatgcttgaaaaaactatacctgttggaacgcctcctcatccattccaaattagatcatcctccgattcttaaatgcttccaataatagaataggtgattccagaggtttattcaaaaggttcttcctgcgatgggtgaacggtacatgcactatatatatttgattttgaaatttaatgtagtaacatttttctgaaaccactatatatttgtttatcttaaaggccaataagcatggtgtttaaataaaaatgtaggcatatatgaaagaaaaattcaacaacaagaagaaaatatgatctctattcttagactttgctgaaagtaagatgtatgatgtatttgtagattgtaatatgctgtcattgatatgagtaaaacaagtttacttttgttaattggtgtataatgtaaaacttgccaaattaaccatttactttccagtggaatgctatgaaaggaatccttatttcaactagttggatcttggatggcatatgtagtcagtgactaaatatgttaatatgtcattaaaacagtcctgtggatttggagttggcccccctcggctctaaaacaaccaccagtgattatgttagataatgccagcaacagtcataataacaattcccttgacccatatgtatacaactattgcaaaatgagaatcccgaatcctgactgaagtactgaacataatatataggcatatactagtgctaacagtttactgagatgcagaagtaatacaaaactgaagcaagttcagcgtgtaccttgaatcccttcacatccagccaactgtatttttatcaagacaattcacatggaaccaattgcttggacatatgtgttaaaataaaaaataaaacaggctaattaatagtactctaatccaatattcagtatggatcatagcacaaaggacaaaatgcatgtgggagtgggagtatattttttttttgataagtgcatgtggaagtgggagtatattaatctatatactatacagaattctgataaactcatcagtatgcttatgctatgaatcaatgtgcctaagataatgttttttattgttgtaaattgtataataacaccaccaacaaggtgcagcttactagcttatatacattatactttgattgatagacctcattgaacacgttagattctttgttttgtaaagtaataaagtagccattggttggtgatgggatttagtcatttactaatgtgttaattaagtcaatacgtagtttgaaagtgaattagcaattagcagagcaatttgtcttctctgagttggagtagccggcttgtgatactgtacagcgtaagaatccacttctctaccctacctactaaacctacaactcttgtttcctactcgatctcttcaagggccaaagctgtgt

SEQ ID NO: 14522 - DNA, 1244 bp, Aquilegia coerulea
  Intron number 4 from transcript AcoGoldSmith_v1.010694m (l ocus AcoGoldSmith_v1.010694m.g) derived from phytozome v7. 0 (chr-ID scaffold_58; pos 1101517 to 1102760 reverse stra nd)
caatccttaacgacaaatattggcgttgtatacaggttggtactttatgctataacttccttgttaataatgttaagctcttatgcatgtattgcacctaaaaatgtttgttgacaatattaatagggtgtaaatattgtgggtttggtttacttattggttgacccgattttaattttgccttttgttttcatgtgttggttgttagttgtaaattgtagttctttgatgtcctttgtgatggggtttcttccttttttactaatacattttttcaagtatatcacttgcttagagtcatttttgttaatagaagaagtagatctttatataataccatttctacttcaaccatatacgttaggaagttgtttggtgtttggaaagttattttgttatggtctatgaattagtgtggttgtgcataagtgcaataaagaaaattgtacttctaatattttagttagcagtttgtgttgtcaagtgaaaggtaacatagatgaactttgagcatgactagaggattttccgattaccatcattgggaagttcattggaagcttgaaatggtttgccaattatttgtcaagaggtttgaaaaggaggaatgttaaggaccaacgtgttaagtagttgctcaagacatcacaccttatgtggtgctaccgtggtccacgtctttcagttgtcttgagtgtttttcaggaatttcatgcctttgtagccttaatctctctatctataaagggagttaagtgttacattttgaacttgatgagtaacagagattgccatcgagattagtaagaaagtagatcatagtttgcttgtgaagtaggcatattgctgaactacgtagttgacttggtggaaaatgattaataagcaaatacttttttttggtcgataagcaaatacatataaccatctgtttgacgtcacatgaccactgttgtagttggcacctcactctctcatttgctcttctctgtctttatctttccgtctctgtggattctgcatataatatactctcctctctaacaccactggcttattttctgaccaaagctcttttgcattttcttataatgttcatatgagttttttatctactcctttaatgtcaagtgctaccttttcacatatgtttatgctctacttgtaattctgtttctgttattgtcttgcaatcatgtgttttcttttaacacgctgtccatgtaattttcatctgcagtggg

SEQ ID NO: 14523 - DNA, 996 bp, Aquilegia coerulea
  Intron number 2 from transcript AcoGoldSmith_v1.026200m (l ocus AcoGoldSmith_v1.026200m.g) derived from phytozome v7. 0 (chr-ID scaffold_68; pos 442215 to 443210 reverse strand )
tgttaagaagcttcctgacaaagtcattgtacatcgtgagttttctattgtttctctttccatcattaattgatttcatttttctttacgaaatattgaaacataaagaaaacatttgtaaaagaatggaataagggcaatttgagaattgcttttgtttaaatttgaattcataataatatatttggttggagatcttccaacccagtcttgtacaggtcaatcttttattcttttaaaatccgtaatcagtatgaagcaggttaattacacgacaaattgtcagctttctgtttcatgaactcttgcaatttgaaattgattcttcaacaagtgtagaggagctgtgtgtctttcattctctcagtgatgaaaaatatgtctgtagttttcaaagttcaaaatttgggaggaaagttcaatttatcttcctgcaatgtttgaaatgccaatctcatcgtatagtgattctttctataccttaaatattggtataggtagctgtgggatgtgatgtacaaaagttgtggttctgtcaaccttaagaaccacagaattaaaattttcaaacctttgctttccagttccttttattggtggtatttcacatatatacaaaagtaatttcctcgcaccagtttctttactgcagaaatcaaacgatgtattgatctttctttatggatctgatttatgtttagaacttaagatttaggactcactagttttttttttttatatatatatatatatatatatatatttccatcctattacatttcttgcttttttatctatcatcagcatcagtaagatcttcatcttttgtctcatgttgcattatttgaaccattattatatgcagccataaatacatattttcaggtgaagtatatcatggtatgatcatgatttaataaaagaagagaagggatttcttttgaccagtctttcaacacaggcagtgaacggaattcatcaacattgacttttgat

SEQ ID NO: 14524 - DNA, 1603 bp, Aquilegia coerulea
  Intron number 7 from transcript AcoGoldSmith_v1.002923m (l ocus AcoGoldSmith_v1.002880m.g) derived from phytozome v7. 0 (chr-ID scaffold_18; pos 1794286 to 1795888)
ttgtatactactcgatttgtttggtatgaaatcataaccttgtttatgcttgactgcaaacgttgttctgcccttaataaggcttcacatcagcatgcatattccaaagattcattgcgaagtcgatatctagcaaaatgtaccacacaaaaccaaaaaaaaaaaaaaaacttcaaatcgaaaacaaggtgacaatattcaaattatggaggagcgtctcaagtggagtttcatccgtttaagggtgattcatggatctaaagatctgtaccagacactgtattgttgtattaaggtttaatagtcagtcactaatctactagtatagtggggcgtgttttccagcctcaaccacaaacttctccccattctgttattgaaatgagcccttgatgaaataagaaatttgggatgatttttagttgatcaagtcttgagttatttgggcagataagtgttcaaacatcttcagtgctagtctagtcgtctattgccccaacttccaaggagagtggacttttggttctgcttctggactcttctttccaattctgtttttatgtccttgtatgtttacaaaattaaagtctatgatcattgtagtaaggtaaggctttatgtcccactatactagtaggaaaaagatatggcacaactaggatacctacccaaaattatattttctgctgatgtttatgtcttcaaacgtttgttttacccaaaaaaataaaataaaaagtcttcaaaaattcaaatatcttcagtgtataggtctggaaactagaagttgtgggaatggtacagagttttaatgtctcttcaacattgtgactgcatcacatgaatttggtaggtctcaaattttgttaggaggaatcatggtcattctgttggcttcaatagcatttggctgatcaaggaaagattggccgaccgtcatagaaaagtgccagacgctttcagggtgatccaaaaactggccaaacaattaaggcaatgatggagtacaagagtcatagaaaagtgccagacgctttcagggtgatccgaaaactggccaaacaattaaggcaatgatggaatacaagagtcaaatgtgtcatatggaaagtcaatcacttcttactaagttaaaatgaaaattaagccatttaaaatcactcttgattggatatgtggatctaggattgtccaattggaaatgataagtgaatgtgtaggccattgggaatagttttagaaggcaaatagcataccatgttataattctaatatgacgagggaaatggaaagtgaattttgtcctaaactgcgacttgatgcaatcttattcgactgtatgctgcttgcgttacatatatatgtagatcatttatttttttcgtttatttgaagtattttttcgtgagtgataaattaacctgtggagcaattagaaagatgtaactagataaattagaaagatgtaaccagatgacaaattccaaaggtaggttgttgacaatctatctatcttgaatgctatgatgcactattctgtagttttgtttataataaacttgctttgcttttgtatcaggttaacggaatacaaaggcaggtg

SEQ ID NO: 14525 - DNA, 1679 bp, Aquilegia coerulea
  Intron number 1 from transcript AcoGoldSmith_v1.010528m (l ocus AcoGoldSmith_v1.010530m.g) derived from phytozome v7. 0 (chr-ID scaffold_23; pos 3463575 to 3465253 reverse stra nd)
ctgctacttctttctccggctctgctgctactactgtaagttctaaattctaatcttcttctaatcttcctaaatcaaatccaaatctaatcaatgttaaaatctttttttttaatttttcaaatcaaattcaaatctttttcttttttcaatttaacttcaattcaagtgttaagtgttaactgttcatatttgaatatattcagaaatttagaattagtagagtacagtgtttacagtatttactgtacaggaaatattaagggagaaagaattagtagagtacagtgtttacagattagagtacagtgtttacagtatttactgtaatccttatcccagggaattgactgtaatcctagcacaggatgctagtgatatgatctacactaggtcttagaattggtattatgcttgtatttgtaacaattctattttttttttgatatatgggtctgcctaaccccagcttgctcattgcaaaaaaaaaaaaaaaaaaaaaaatattaatggaaagaaatactgttagagtagtataaagtgtaaattgtggggtctgatcggagcgccgcttgagcggtggaggcggttccctgaaatctgagcgcctggcgctcagctccgctcataaaattcccaacatttttttttttacctttagcttctgaacatgatagtatggattcttatttagttcttcatataatgtcttttttacttctggatgagatctttttatgagtttaggtttgaatgtctatggctggacactgtgtcttcttcttgtttcttcgtgttccttgttacctctacgaccttcttctcttccctatttcagtgttgttaactaacaacaaactctctctctctctacgccaagtcgccaatagtagggtttttttataaaccctaattagaattcgaaatatgttataaatattgaaacaattgttgatccattcccatccagaagtaagcatttataagcatttatagatgctttgatttgatttcaacgtttatttgatgtttttcttagtaaagtttttttttttttttttttttctcttttctctttgttatgaattgattgattgaataattgaagaataattagtgataacttttttgtgtagtgtggtaatgcattttaactgtttgatgaattgtctgaatggaatttgtgtttctattttataatcattagtcacttcataacatgaattccgctttaatatttcatgatattgttaaaaattaagtaatataatgaacacttagatggtctaattacaatctaactatagcttcatcccttttaggaactagaagcacctttaataattctgtggaaactcaactgctgataattctcaactttatctgttgttttctcatatgtcgttatctgtaaattagtaaagtcatgggattgggctaaactatctctatttctaacaaatgcaatttattagaaaccaattcattaagaactagacatacacttgtagatagaattctcaacttttttttttttcttgaacttctgaacaagatagtatggattcttatttagttcttcatataatgtcctttttatgagtctaggtttgaatgtctatgtctactatctgatccggtctttcttcttttccatcagggtaattttctttctgaaa

SEQ ID NO: 14526 - DNA, 1321 bp, Aquilegia coerulea
  Intron number 6 from transcript AcoGoldSmith_v1.005408m (l ocus AcoGoldSmith_v1.005408m.g) derived from phytozome v7. 0 (chr-ID scaffold_45; pos 201475 to 202795)
gcctcaagtgaagctcaaagtggcagccatctgaggtatgtttcattatgttcataaccatgcaatgattatttagaaatgggagattgtaggtatgctgcttgaacaattcaaaatatttatgcttaaacttgaatttaccagaataataaatcatagactcgaatgcataaattagcatcattctcatgaaatactctgggaatgagaacacgctgagaggagttcatggtgcctaccattttaccaattacgtaaagaagattcaaaatctgaagttccattagtttttctgctaatgaatattccacccctccaaaattatataaaagacgaatttaggtcattgccaagactcaatatgtcctacaaactggaaaatatctaaattatcagttaatattcattataaagaaaaggtgaagatttttttatttttatatattcgtttgacttggccttgaaagtttatatcctttgccttagaaaggtatatgtggaatttatgttacccaatttgaagatgaaaaacttcacttctcatcccaaccaatcataatggaatagatgtcagttggcaacctaagcagcacatttgcaagcacactggcccattgttgacctacaataaagaagacaagtgtctgctagtgaccattggcacatgatcgctgctaaagccaaaatcattggtgtttaatgctagtcaaaagtacagaaacgatgcctctaatgtattgataaatatttcatataacgtccttttgtgctgcctcaataatgggaatcactgttacccgacatagctaatggttagactgacgtgcctattatagacagttcaacagactgcagataatatagctaattattagatcgcaccagtgcagttatagagaattttaagtagtgggtcatctcaactctcttaactttgacaattgctttaaccgcctttaacacccattaataagaacttttgtcttgcaaactaaaaaatagacctctgggcccttacttactgttttgttttgcattgtcttctgaatggccaattggccacataataagtttagggagtaatgggggattgtgtacacaatgtgatcctctgcaactcgaatgattgtatgtttcacagtttttcgtgcttcatgatgatcccatgattgagatttgagatacaaacacgggatgcttattaacatgaaaagtatggatattgctatagcctatatgtgcacgtatatatgttatttacattatcttaaataatgacatgacaggcggagattagctgcggatagcagtccatcccaca

SEQ ID NO: 14527 - DNA, 2908 bp, Aquilegia coerulea
  Intron number 12 from transcript AcoGoldSmith_v1.005268m ( locus AcoGoldSmith_v1.005268m.g) derived from phytozome v7 .0 (chr-ID scaffold_23; pos 3157677 to 3160584)
cgctcaagaatctttgtgacactggcgttgttcaggtaattctagcgacaaccacaaaatttgaatgacagtctctattttatactacaatttttttatatatatatttttgagtgattcaaattttaaatgaatcaaataccttttttcataacgtaaaaaggtaaatgttggggtcggccattttattctcaaactttcatttttgggaactgtctcaattgaagatggtgtgatattactaccaaataccatgtagatatgtagttagttctctcttttcactttatattatgtaacttctctatcatatagtcattgaaagaatgtactccgtccgtcccaaattatgccttttttggctgtcccaaagtatatgtcacttttcatatttgaacaagttaatttgttcttttgcttatattatccttgctcttttgcgtatattacacattagatgagtaaaaattatcattataattaatattaaataaggataaagttggaaatttagttagcagacaaaccaataaatgatgttcccttaataagttggattttctataatgtacttataatttgggacagagggagtagcatttatttatttggtagggtgtttgttaacttctttcattggtatatgcttgatatattcttagtaactttgcttggtctctattccaaaaataaacaagtatttgatcgacatggggcgctagttaaaattggaggtgtataataaaacttcaatctcgagtctagctaccacagatctaagtgaagaactttggcatgttaggagaaagagccagctgtacccagtttgtatctgttagtaggtctctgttcacttcaatgtagatattctcccacaaattaacaaaatctcatacccagtttgtatctggtgagacactctctcaccatgtttttagctagctttaacttctttaatatcgaaagttcattcttgctgaaaactaaagaagaagataattttctacacattttttttttatcaatagcatgagtagagatgctccagagagaacttgacaatttgctcatctatccttgatttctactcttcttcccccacattgccttcgagtgaatacattgttctcctccttttggtcacataaggttgatacaactgactggtagagcatccaagactaaactcaccaaatttggacttaaaccatgtccatagtgcatcccatttctctccaaacctaaaaagctagctttacgtgttgtcccttagtgtccagcccctatctattgttagaacacaatcttgcttactgtgatcccttatggtaagcttctttctcttagccacactctaggtaatagagaagaaggcatgaagtacactggtaaactcggaaaggtgttctcgatgaggaaccccctgcgtcttaagagatggtgactcttccaactccagattcctcctaagtttttcatatccctaattctctttgatgaaagagccaaaaatggagaggggagaatgcatgagacacaacccataatgttcgccagagacacaaccaatactgtgatcctgttaatttggtagttaagataaaacaaggcctgtataggaagaaagatgagacaattggcatggaagatataattttgttgatttaaatcttagcatattctaaacgaaactaaatttgataaattggttactgaaccaagtaaaagtgtatgacatcctaaattggtattagtattagtaaattggtttggacttgggaatggatgtcaggtaaatgatgatgcatatacgaacagtaggtatcgaacaaatcccagccgatggaatcagagtatggatggatctatagtggcttgcaagcctcaacatttgctaaaacttcagataatgttatcgatacagggtgaagcacagaggaatactcaaatttttgtcagaattttgaataggtttatggatctttgggaggattgaaggagtctagaaacagatccttatggttgttcttcatcctgaatctcatttgtctttgtcagtttggtttgtctgtgtggagaaaagagagaaaagaatattgagagggaggagagatcatgcactgttaaggaaaagtaaggtaattgggatttattaagagcttgggcattaactgcaatgcaaggctctgattttttttaatatggttatcaaaagtaggaaggaggagaatgtaggacacagtgacattcttttggtgagaggtaaagcgttaaaaaaaatactataattgtgttctcttcatcaaaactttaggcgggacaactaagttttgtgttaacagttggactatatgcattgtatgccaaattttgattggagaagagaacctcttttgcaaacgagaatagaattagcagattagtcctgtttgtggggatcaaaaattttgcccactggagtttgattctgtggctgtagatatatcagtgacaaagggatgaggtttggccaaggcatagtgactgttgaagccgtgtgttgtatcattgtttcttttgggagtgaagttttaggagcaaggaagcgttacatactagtgcatgattatcagcctatgtttgttttcatctgtttttttgttgttcccaatgttgaaatctgatttcttgtcatttttaatgtttgctgtggtttgttactaaaagtatctgaatttttttgcaaataagaattgcttttcttacacagtttcttgcacatcatgatttggtttgtgtaaatatagatttttttcttcggtagaaggcataaagaacgatagttgcaggttttgtcaaaaggcaactaactcctaccatgtctttctttgcagccttatcctcctctgtgtgacattaagggtagcta

SEQ ID NO: 14528 - DNA, 739 bp, Aquilegia coerulea
  Intron number 4 from transcript AcoGoldSmith_v1.021019m (l ocus AcoGoldSmith_v1.021019m.g) derived from phytozome v7. 0 (chr-ID scaffold_25; pos 79161 to 79899)
gccaacagtgtgactgtgttcttttaggaggggaggtatttcatcctatactattacttgctctcacatgtaattcttaaattctaaatttatcgtaaagactgttttaaagatgctttatatattgctgaaatttacgcattcttggccaccgaaagaggggaaaacccactaatttggacaatgaatgctattcaatatattagaacttgtagttaagcatcgaaacattgttgcaaatcctgagaatatgattccaatgcgatatcaatcaaagtaggaaatcccaaccatcattttgttttgtatatttatttgtattagtattctttctattcctatacatgcttgggaaagctttccagatcaatgacctcagtgacttttagacacatgatacttgttagggataattgaacttgggccatttatatttcgaacttgaatgatgtgccacttcccataaatttataactaacctttgctgactatatccttctgatgattttgtcagtaattattataattgagctgtgatgattttgtaacaatcgttttatcattgagttgtggatatgaatatatgattcattgggtgaatatgtgcctgaaaaattcatgtcacagaatttaattactgaacttcgtgaagactactacagattagatgaatccataagaaatttaatgaactagggatctcaatggaatcttgttttgggtcttgcagacagcggaa

SEQ ID NO: 14529 - DNA, 822 bp, Aquilegia coerulea
  Intron number 7 from transcript AcoGoldSmith_v1.001185m (l ocus AcoGoldSmith_v1.001185m.g) derived from phytozome v7. 0 (chr-ID scaffold_13; pos 6066702 to 6067523)
cagattcgagggagtaaacttcataatcgagtcaggtattctatgacttccacttgattttcatgattttaattcttaaatttgaatcaatttgcggaagttacacacttttagtttagattttgaggtgcacagaatacaactttttgggtttttcttgatggttgacttgtatatcatattatgtgtgtagcatgttccacgcgccacaaactgttgtcattttaaaagattctgtgtaggaatatatatatatatatatatataactgacacatcgttaggtgtaagaaaaattaattactacaagttccacgaatctccatttgagatttatcttttttcacggtaaaaagttgagaactttggtcagtaaaaaaggctacatacaggatattgttttgggcaataagagatgaatagataccaaagacctgaatttgttagtgcctataaagaagaggatgaaatgttgaatttagaatgaattgaattatttaattattaacacatcagcatgtcattataccgaacaattcttactccatttaacttgataattaagcaagagtagaacgtataaagttaaagtattattgaattattatcaagtatcaattagtctttgttattgtttcaaattgaagaatagttatgctatggtaaattggtaatcttgtattgaaccttagtttgttaaatcatttaaaatttatttgtagttttgtttttcagtttaatcatggccacactttgtttgatttcatattttgatttgtgcatggcagtgctccaccacctccacttcaggcagcgggttttt

SEQ ID NO: 14530 - DNA, 961 bp, Aquilegia coerulea
  Intron number 3 from transcript AcoGoldSmith_v1.004045m (l ocus AcoGoldSmith_v1.002844m.g) derived from phytozome v7. 0 (chr-ID scaffold_6; pos 7908928 to 7909888)
gtttaacagttcaagcatcatttcttggtggtaagttgcttcacctaatcctccatagttagcttaccaaatcaaacaaatacattggtgtcttgttatccatttattaggtatgatgttttgggcagaacagttctaactttttcatcgtgtgtacaattaacgttgcatgcctactctgattaaaagcgtgatctgtgaaatgccacgtacctcaccttcttagtccacttcctaatatccatcattatgatgtgtgatgcaacaagttctttaactgttaccagcaacaagtgtagtttgccacgcggcgtgtctattctctgctcatttattatcagagttgcatccatacagcttgacccaggccacgggagatcataaagatgctgatgtctatgtgatattctgctgagtagatggttgatggatattcttctgggtagatggttgatgcttatgaatcatatgtcctgtgcttagaagttattctgacatgccttagaaacctaaggccactcaaagcatggttttaacaagttcgaattttacagtaaagaaaagtatatacaaaatgttgatttagatttataaagacttgatttaccatgtaactagtgctcccttttgtttttatgagtaaaaactaaaatgtagccattgatataattgggaagctagtacattgtgaaattatccatatactagtcagcaagaagctgagcaaagtctagaaatttataaacatcatcttaactgaataccctaactcatgattacatctattgccactaactctggacagcctatacagactactctctcatttgttcttctatttcagtgtccttgttgtccttttcaattagttgtacttttcgtcctttatgtgcaaacttacagcttcaatgcaacatgttgtgtaggtatctttgagaaagtaggaattgaaccacaagtg

SEQ ID NO: 14531 - DNA, 2728 bp, Aquilegia coerulea
  Intron number 4 from transcript AcoGoldSmith_v1.024167m (l ocus AcoGoldSmith_v1.024167m.g) derived from phytozome v7. 0 (chr-ID scaffold_114; pos 354863 to 357590 reverse stran d)
ggagctattgttggtgggattcctccactgcttgggtaatttctttatctaaattcagtatcttggggttcttccatattttataaggtgtttcttttgcatgtatgtttataaattgacgatattatatcttatgatcatttgatattgaggtttcttagttatcttggtcatagaaaaacctgtgcatatggatcttcatattggttcaaagagctaactataagatacagtggaatattagtggtggtctggtggaacacagtaaaccttatattaaaatagatccctcaaggaaaaagttttctgaagatttggatattaaacaaactgccacatcataaaatcacagtaaattaacatatttagcactgtcatttctaagtctttccttttaatctgttcttttcttgcatgatctaaacaaaatatttcatctcttcctggtaatttttaggagtcgccgtttcctcttttcgataaaacaaagcatgctcagttatccacttgtttcttcaaggcaacaattcatataagttgttaaaattcaaatttgcaatagatctaaatccaatgttttattttcagattgtctaaaacatttgattgtctaaaacataaagtcaagtgacagagagtgcatcagtggtgaatggtttacacattagaaagattgtactgcgagattaaaagtcatagcagattgggtttgctattttgaatctcagtttaaatagtttatcatgaaataacaaaaaggaaaagaaaccagaacagtacaagtcacgattgtgattagtcgctgagagacaaggcgaccatggagttgttccaaacctgtgggcacaatataagtgttctgttctaaaatcttagtagttatggtgttttgacatgttgggcttgaacctcactgacctgggattaatttagagtacgttgtaattaattcggtttgtctattatggtgtctcaaaatagctttgctaactatacaagcattattctcattattggacctcgcaaatcaacactgatgtgctctatgttcagtagaggtacctgttaaaaacaagaagtaaatcaaactgctaagaagttatttcttaccatacaagtatctggtttttgttaataaaaggaaatattggtgacttagaacatagaaccttgaatttggatcccattttggtatttcaaaggatttgaaactgctaagaagttatttctaaatttctaattttagagaaaacaaaagtagacaatggatgttgcttatttgaaatgaaacaaaaatgttgccttaaagagatgggtggaaaactaagcaagatttgtttcggttcggtaagaagaggaagtgacttggttcttcatttgaagatatgtgaaaaatgtaattaaaatttaaaattgggatttgaaagtgaataggatctgtctcgatttaaaacgaagaataaataggatgaccaaaatcaccgaacgcattctttaggttaaattgcataccacgattatatttaggttcatgcgattcagatatgcctcgtagaaaacctttttttgtttttgttttgttttaattttctcaagcttgcttttcactgtcaaaatttcgaaaaggacttatgaagacttaatgggagatcgaaacccttgggcgagtgaagcacattgtcgatggagaaacccttttgggaacacgacccatgagttaaactcctctgggtttcattgccccgtatattggcaagtaaaaggtgacttctggtcaatcgtaattgaactttaggcaactgattctttaaaaaacccaaagcacatttgtgttttttcaaccagggatgaaaacttcaaatcttcctaatagatatctctattctgaccatttgataatggctctttagttcctccaatatgtgtaaagcatttgtagaatgataaataattataatttgatggatatgctagcagtttagcactcaaggttaacatgtagtattgaagtctaaatttggcatgcatattagcactcaaggttaacatgtaatattgaagtctaaatttggcatgcatgtttcatattcttgactttatatataactatatattacatattatgtttaaagacctatggttaatgattcgattttcgttaggattctgactatcaaattttctgatttactagtttacagactgaatctatgtgggaagggacacaaaatgtttgttttatacaagagaagagacacgaaacacttgttttatataagaggagagacacattagtaaagaccaaagaaataggctagaaataaaaaaaaaaattggggtaggcaagcgcggttgtttacggccttatggggggccctacccctatattaatagaaagagtttatgggcaagaaatgtgtgttttccaggaaatctgttttttgcgggagacagaagagcatatatccgaggtttgttcacacaaaccaaaacataatatactctctgattcctgcgtggttctgttctaatattttcttttcaattgtaacctatgacaaaaatacattcatacgagaagatcagaagatgggaaggatgcatagtaacatctgaggtcacacaattctttggtttatttaatttaatcttatcatgtatgctcataccgcattatctgtcctcttggttattaggtgggctgctgcttctggtcagatctcgctca

SEQ ID NO: 14532 - DNA, 2011 bp, Aquilegia coerulea
  Intron number 3 from transcript AcoGoldSmith_v1.002661m (l ocus AcoGoldSmith_v1.002661m.g) derived from phytozome v7. 0 (chr-ID scaffold_13; pos 166946 to 168956 reverse strand )
atcagaaaagaggtttggcccttcctccttggagtgtaagtgtagcctttaacttttaactgatttcttttttgtgtcataagctttgctcttttcttttataatatggtaaaataaaagttggccacaatagcttattctgaaaaatacttgtaaactgaaaagaaataagtcaataacaaagataaggcaaaaatcaggccaaaccaaaatgtcctctacatatatttagcaatatgcctgcagtcctgcacatcaaccacaaaagattcaagtgaattctgttcggaattttcaaagctttgtctgtagaatacctatgtatgaccatggtaggttttcttgtctttgatttgttgaacaaagttgtaaaaagtaatcaatccaagatcttctatcagaagaggtgagttcctcccaggttagtttaatcctcataatctgcttcaggtctagccacacttgtctataactctgtaggtggcttaaagtcatatttagaaaaaaatactgaagaattggacatcttaaccttttaaaccaattaagggtgactgctactcctcttcaaagttaggaggaatccgtaccacagcagagcctttagtttctcgcagatacctgcagactcgtaagtctttgcggggtgggtgggggttctataaacattcactcactcattttatggttttaggtttatagttggtgctttacctggagtttatacaagggaacctatatcaatgcatctatattaaaactaatatttttgtactgctatcatgtcttcaaggggtcatccatcttatttgtgcatctcttgatattgtagaagttaagctagttggagtccactttttggtaaaatggtctctagaatggggggaaaggatttccaatcatgggtgatggtgaaattaccctcagaattattcatctttattgcaatcttttctttatgtaatcatctctaatataataaaaggatcaaatatgtttaactttttacggaatacctgaaaatttcaatttagtgagatggagggttatgtgcttacatatataaagatggggttgagatacaaacatattaatattttgaaaaaaaaggttcctttaaaattgacggctttggcgtgttggagatgagcttaacatttggacagttgcgtattagatgagtttgataatttgatagaaaatattgctttgcccggtgttggtggagtggataaaagatgctgtagatcaatccaattgaagattatcattgaggtccaccgtccacatgtattagtttagcttactagatagctcatattcgttatgaaagcaatttatatgtctttatatgtggcttttccacatagatagctaattataaattctttgtggattagctttctaagtggggtttacgtctttacaatcaccaagtcatgtcctgagagtgctgagtgctgacagaggcttatgtcgttcttggtgactgagatctgatgtagctgctaatttattctccaattgaaggaacattgtatcttgggagtggccaagtttcgttgcagatggtagttaagattcgtgccattgtcatcgtgtgggctgtggaaagtgtggttctcatagggcactgtgtgaaccatgtgattgtgattttattttacattgaattttttgttctgttacatcgtttttatgcaccttgcttagtaggcctttcttgtctttcctccgtaattccccctttcataacatcagtgcacactcatggctaagttctcaacttctcattggaaagccactttagctgtctcttttattaactaaaaaaaactataacattaggatttcaagatctacaaaaaccagtaagactgaaggaaattatgagcaatagctcgcatcaacttaagaatagtatccggctatctgcttgcaccacttctgatgtttttacaatggtaatgttttgctctgattttaattcttggcttttgatcattcagat

SEQ ID NO: 14533 - DNA, 1919 bp, Aquilegia coerulea
  Intron number 2 from transcript AcoGoldSmith_v1.017965m (l ocus AcoGoldSmith_v1.017965m.g) derived from phytozome v7. 0 (chr-ID scaffold_4; pos 4473663 to 4475581 reverse stran d)
caagaaattccctgagaatcggaattttttgattggttgcattctattatatcctttttgtttgtttgattgatttaatttaatttagtttgaagttatttgttttttttttttttttttagatattgaagaacttttgtttaatccttgactttgcacaaatatgttttcttcaatggattgttgcagtttgttgcatacacgaaggagaagaatgcgattttgtttacttatccaccttctgtaagccttgttcacttatttttgagttaactggtcttttaagtttgagaattttgcatcaagtattgctgaaatgataatcttcttttgtatgtagaatttgtagtttaaaacaaattgcataaagtagttagtatatcatttgacaagtttaaaggtatcttgaaacaatcataagaatgatatagaaataacgagaaacaaatgaagcatagttataaatgaataagcctttaggatattcatattacgctaatgacgaattaagaagcaggaaaaattagtttctcacaagttacagaggtatgattaatgtagaaaaagaagaacataatgtgttcttgaagatcgtaggagactacctattcttcgttttttagtcagttggggagataatattttcaaccttgatcgattgtttaagttttagcttaatatgaatatcctaaagcctttcagatatttatttttttgaaccttaattgattgaataaaacttttgtacctctatcaaacattcaaacaaaatcataatcacaacctaacactttagcaataatgataacttgttgtaccttcatcaagttttgtgcatgggaatttttgggtaatgattttgaaggtttgaacttggtttgtggcaacaatgcttctatccatcaagtttttcttacaaagttgtttagtagcaaacatgtctgtgtagtttctaaaatctccagtagagttgtatacacatatttcaaaaatataaaatagtttgtccagattgcgagcagatcgattatagaattaggatttaggaagcggattttttaattaggagagaaattgttaaaatgcacatgcacacacacaagaaataaactcaagtacaaagtgtctttcttttgccgaggaagaatggtttttatacaaagattgtattatatatggtcccaagtggtggttgattcttacatctttttccaaagtaacttgtttgtgagaggtgtcctgcatttcctttctattttagatttttgtctcttttcaagtagtaggctttaagtcgttggaatcctatttggtgttgtgagtggcaatatgcctcttaaattgatttcttccttggattgatatgttttcctctttcaaatgccacggctgggatagtttagtgttggaaactggaaagatcagttgttgattggaatcatcgtattgaagatgtgcaatcatctatgtagcacgaacacgtctaaaatgtagtgtggcagagttggacattgcagtggacatggacacaactcggacacggcatggacacgtgtctgaaactacaatataatacagctacccttgagagttgagactaaggcttaagtggaacagacgaaaaccaatctagggttgataatagttctcaaacatcaaaatattcctttctatggccagtgctttatactgttttttccaacatagtatttggcataattatctaatatttttggaccgaaccccaaggacttgttttatttaattaagctataggttcatttgacacctagatattttcgtttatcataaatagatgagtttagagggtaggatctttgtaaaacaaaagcacataaaattttatggtttccattcactggcatgaagtcctcgtaataatttgccagaaaaggtaa

SEQ ID NO: 14534 - DNA, 4431 bp, Aquilegia coerulea
  Intron number 6 from transcript AcoGoldSmith_v1.002697m (l ocus AcoGoldSmith_v1.002697m.g) derived from phytozome v7. 0 (chr-ID scaffold_18; pos 1579653 to 1584083)
ctaataacgctaacacccagggaactgtactgcaggttagaccgtagtctgggatatgatcgatgttttactgaataatatgtgaagtgaacttgctctgccaaactgtacaatcaagaatgcttttgtgaacaatatgctgagtcatttctgaattttattgcctgttctgttgagatttggttccttttgtagtgcatcacttgcttttctgctatcatagtttcttgcctatttgtttgtgcaagacctttgaatcggaagtttcaagaaactgctttttgagcaacttgagtttctgttgttagttccgcattactgtgtgcttataagtttgaccatttttaaagatggtaatggttatcgtgtatttaaattttgttgagaatttgctttaggaaattactcctatggactaaagtattttcagaaaggtgaagtttaatatgaactatagcctataggcaattgatgttttttccctacacaagatcttgggcccaacctcccaagtcttgaccactggacactttcaagtggtaaaaacttatggtttgggtctaaattcttaaaacaacttaaatttttaaccgaccaaaaattgtttgacataaaatcattcttttctagacttctcttttctacatctctttttgtcatctatgttcttctccttagctaattcggtatccttagggaacctcatttttgctctcccagacctcgtgtttatttttgtcagaaaaataccagaaggtattcaaccaacaaccattcaggttggatcaaagcataagtatgtcaagactttctacataatttttcatttcagaattaccatttatgaaactaggtgaaatcttcgaaaaattttaaaaaacaagatcatatcaataaatcactgctttctgtcgttgtctcgttgatatgttggagactttataaggttttgaaggaaattctttttaattatttgatttcgacaatttaatgtatatcatgactactaacatgtaggaaatttcctacgatgataaaaaaattagattactaatcccggtcagttggtgactgaataagttgtgtggacatccaacgataatgtccttttgttaaatcatttgtcattattgatgtgtgtaaatcatttgtcatgattgatgtgtgtattacaaaccattggtatcccaagaagcttctgtattggctatcaagtttattggcgatttctaaaaaatttccaagtcattcaaggtcactgtatatagcaacgataagaggcctggaagtaatgcataaaacacaaagatgatcccgtctaaatcactgatcagaattttcagttgatcgagaaacaagatacccaaagtccttctacaaattaattgagtataagccttcgtttggtggatgtatagagggtagcaatagagggtagcaaaggttgactgtatatgatgttgaaggctgatcttataagtcacatgtgaagttgcatatgcttaatgtatctacctcatgactttccaacaagtttggagcaaggaatactgaaattgaaggcatgacatttcaaatggacatagtgagggttttaacaaaatgttctatatcacattgtcctaaaggcttgctatttgtaagtaatttactaggatctaaaagtgtactttagacattcatataacctccatcatgttgtagtttgttgaatgggtcaggtaagatgatattgatatatttgatgtacaccgtatttgtatgacatttattagtggtatacatagtacaaccttgataaattaatagccttcggaccagagaaaattattaattaagtgagatattaattaatcgattaattaataaactattaatttatataactaactatatgaactatccaagcaaaaatgacacaacttcataaatgccaactgatgaggagattattgagtgtcattgaagaatgatcgagatgataagctaaagatgatagttctaatatataaccagttttgtgaaatgaagcaattaaagcgataatgacattaaataatttcttctttcagtacgagaatataacaccaaatctacttattatactacgataattaagatatgaggttcaaactgacatcaatttccagaaaaaacaagcaacatttaactcttatcttaggaaagcataaaatatatatgtatatcaaaaaattattaatttatatattagttgagcgttcagggatttttctaaaatgtattatctaataaatatagcgaaatattaatttagcaacctatgcccaagttgggactagccaaaaatattatttaaaggagataattaatttattgggtattatcttatcgaggttctactgtagttcttttaggtacgtgttggagtgagtgttgcattccaagttccaatgatcaaacgtaaagtgttggaaaacgtaaacaacacccacttgagatttgggaattgattcgatctacaaccagttctgtctgtatttatcctccatttgatagtaatatagcttaaggtgctcacattaatgtcttaaaatggttttgtttggcattgcgacttagaattcacgtatagccgggtggatgattgctagttgtctacatgtacaaagatcttatgtccttgcttgaaaatttttccggcactcacataaatgtcttcaaactttttaacgtgatgctgcagcttagatttcacatatatccccggtaggatattgttagctatatgcacaatacacaaacatgacatgccattgcttgcaatatttttttctgccgctcacataaatgtcttcaaactttttcacgtgacgctgcagcttagatttcacatatatcccaggtaggatattgttagctacatgcacaatccacaaacatgacatgccattgcttgcaatatttgtttttatgcagttagcttttatatcggggaaagaagttgaaaattgatcaaaccctataacaagagcatcgattgtcaccattctaccatctcgctaatgttgactgttgctatgtgggtcttacctagtccatttgcaagtggatagatcctaatatgcatggtgtaagtgaatagatccatttgctagtctagattattgtaaataattactcctgttactagatggcattataaacgatacaattgggagttattcgagttatgatgtggataattgtaccgagtccaatgtaaattctataaagagagacaggagagggggaatgctatgaacatatgatcattgtcgtggttgagtctcatacgatgggccttggccatacattagataccattctgaactattcaagttcgcaatgaattgagtagtcattactgaattgcttggttgtagggtccttctcattttgaacattatccattcatttactaattacgagtagtggttaaatgggaaagcattacataagtcacagttttaagctgaattgctgaattaaatttttattgattgtgaataagtcacacctgctaaaaataacaggagaatgagggaggaactcacccaccaggccagcattacataagagactccaatcataacaaagtacagcagctcatgttcttaacagctcctatcataacagcttatctactttcatgatcaaggacttcatatctggatcatctttttgtacggcttatacatttgaatatagcacgtttgatcttggtcgccattggagtacccaatatactgaatgtctacaatctaatctattagatgcatcagttatgagttaacatagaattttactagaaaagaaataaaatttagatccgacataatatctgtatcttctagaaagggcaaatacgtgtgaatgttaatgaggttaaacaacaggaaaacaaagtggtctgatatggaagtcattaaaaatacgtggataatatgataaacgtttcatggtattcataattttccattctattatgtatggggtatttatgaatatctttttttagaaactcttaagtgatttacatttcaataggtgatacattgggttattgattctgatattaaataccaagagattgtaagaccaataagggggagagggtgtggagttacacaaatgtcatgttgaccattctttcgtttcagttttaactttctttacaaatgtttgccagtgatatggattgcatgttcgttataaaacgttttggttgtgtttatttgctatgtatctaaactatttcatataattccagtgttagttgcaagtataactagtttggattttgctgaaagttattacaactgttaatatcttgctgcttttaatactcttttacctaaataatggtatttcttaggctacgggaggtcaatttattgggagatcaattcc

SEQ ID NO: 14535 - DNA, 2508 bp, Aquilegia coerulea
  Intron number 2 from transcript AcoGoldSmith_v1.009265m (l ocus AcoGoldSmith_v1.009265m.g) derived from phytozome v7. 0 (chr-ID scaffold_65; pos 1083174 to 1085681 reverse stra nd)
aagatatcaaggtattataacattgtctttataataataataataataataataataatactgtattggttttttttttttttaatttttgatgcagtttttaggtttatttatgagaacaagtgtgtgtttgattttacaagaatcttgggaatgcgattaaagtctgtgcttgtatgatgtccctggattgttttgttgttgataaaccttcatgcctgctagatgtgctgatgaaggtatacaaaaatgaactgggggcaattttgcgttgtggagtgtttattgtttaaagcctgctagagatgtggttatgaaagcatttgaaattaaccttgccgtagttctgctctgctagggaaggatattggttacttgctagtgtattaagatgctgtgtgggaactgtttgatggccaaataataggggatgcagaaggaaagataagaaaatataagaggaaggggagaaggagaaagagtatagcaaggcagagtggaaatatgtttaatttagattaacgacaattttaactccacctattttaagagtttactttccttgtcagatgactctgataaaaatttgttctgtgtgctatgttcatgcatctcctactgctaactgctgttattgcaaaaacttcatgattcatgcaatattgtccaaacccttttacaaggcgtgtcctagtacaagacattatgtcgggagggagtcatcaggtgtttcaatctaagattctgaattctaaatacatatgcttggttcactactagagttcttgatctcacaaatcaaactcacaaggagttttgtagatattggaaagcttgccaagtttgcttgaagtgtatgtgtatctaccatgggatgacacatgagtttagtgttaactcccaaattggattccggataagatggttgaaactttaaattataccctatagatgtgttgtcctggttttttggatccacagaggagtataaccgttggctgtttcttatcagccatttgctcccaaattacatgggagctacaagcattattgacacaagtcctggaaacttgagaagtggtcactggtttgggcttagcataggtagcacggactcggactctgactctgacactgactcggacacggacacggacacggcgacacttgtttatcccaaaaattaggacacggacacggcttaggacgcggcaattaaatatatataaatatggtatatcaataaaatattagaaatcatgtcatgtatcatatacattcatagttcataaaacatgaaagagaaacggttggaaagatattacaattcgtcttaaattaggacttggaaacagatccgtgtccaaaacagtgtccaagaagtgtccagaacagtgtccaagaagtgtccaagccgtgtccatgaagtttccagattgaacggcacatgggacacgcatgtgccgtgtcggacacgtgtccaagccgtgtccgaagcagtgtcagtgtccgagcagtgtctgacactgacacaatgaatttttagaagtgtccgtgctccgcttagcactgaaatcaaaaacctcttccaccccaaggtatttggcttcagagatagcagctaattcataagttaaggaagaagatcatttatactagggtacagatatgatgttgagtatctctggattgtgtgtagagaagaggcattgcattttgaggattagttgacctgattgtcacacctacttatttgaggttcctgtggtggctgatgcttgtttgtcctctttcattatggcttgtgaggctctttctcacttgtatttactttgttggcaatgtaaatttgtatatatcataaagacatttatgttatttctcgaattgaattatttttaatctttagcattgatcatctcattaaaagcaataacaaggatgattgaaatggatgtactaaataatttgtttgtatgtaggaaaaaatatttattcttgttaaattaagttcaaatagcttctattgataaaacaatcagagatatttttgtggcaattgttatcagtttttcctatcaaacaataaaatataatatgttttgatttatccaagtaaggtattctgataaaatgaaattcatgctgtaacacctgtttctcagtttcaaatgtttaaagattgtacagcagaatttcagaaccttactaagaaagtatgcaagtaaaaaatcatctcatctgtctccctgcccccgcccccaccctttttccattttatcttttgatctatatgatttttctttgaaatttgggctgttctgcaatctacttccatgggtagttcctttcgttgttaggcaaattagggccagtaaatttgttgatgcctcctttgttaattttgcatcgaagtttattggggcagtgtaatgtttctttgatcgttttagctaaaattacctttttgcaggagctcttttcagaagttggtgacctgaaacgcta

SEQ ID NO: 14536 - DNA, 3119 bp, Aquilegia coerulea
  Intron number 1 from transcript AcoGoldSmith_v1.003882m (l ocus AcoGoldSmith_v1.003882m.g) derived from phytozome v7. 0 (chr-ID scaffold_1; pos 5500319 to 5503437)
cagtttcaggtttattattttaaatttaatcttcattttctttaaaatttaaatatgtttttttcttgtttgtgtgttttcttcatttttagttttggtttatcctagtttttttcctgtatgcttcatttgcctatcaccatacgatggacgtcctagtttcgatgacacatttgcactgctgaccaaagagatatgcatacacagatctatatgcatttttgtggtaagatgtgaattggagtacaatagctatagaacctacatatacatgtagttttcacaaattacatgtcagttgttttttattaataagatattttagattatcaataacaagaagaaaaagatgtgatgatttcaatgttagacaatagaacctctttaaattaatagtgttgggacctatacaattttattaaaatttattaatttaaagagatttaacttaccaagtgttgatttagctactttaagaattaagaccaaagaatttcattaacttagaaagatattaacaaatcgagtatatttattatttaaagaagttctaccatactatgataatttataagtgggccaatggccatacaacgaatgaacaaaaatatatatatatatatgtgggatgggtaccataaacgtggtctagactctagactagaaagatgttggatgagtttttggctcaacgtggagcatcactttctggggaaagaaatcttttggatgtaacctaagctatggtcccgcttggtcgtttttgaaagggacctgggtttgttttggaatacatcagtacattatcatcatggtgtatcagtgtatgtcaaataatttagtagggtaagggattggaatttagtagtataaaaaattgggaaccaaaccgaaaatctttataaaatctttactattttttctatcatatcacgtcattttattttatttttcgacaaatggtatattgagtttataataataagattactattaatagttgaaagttgaaataattttatacaatcatagattgataaaacaattttgattcatggacatgctcggactttgtctattaaaaaagtattaagataattaaacatattgtaaagattaagacaagtaccacttgttcaagtcattgacctagttaaattggtgctaccaatattcttacttttgatgtatgaaattatattatcatttgtttgtttgtttgtttgtcaaaaaaagcatatcttaattttcctggtttactataaaaaatcaagatatattaatattatttttaagcagctgatgcaactgtttgaaatttgaattcaagatttaaaatcaagatatattatcatttgtttcttaccctgaaagtgctgaatcttgggatatttttgaatttgtcaagctattatattgaatttcttgcactctaaatcaagagtttgggtctaagatagtaagatgggcaaaagcttgaagatatctattaaaaattatcttattgaagataagaaagatagtttgactttgactgcctcttaatatgccggcacactaacggcttgtaagttgtgacttgtgacatcgatcggacctgattttgtgtattcattatgtcaaaatcttaaagtcaatgtgtcctggaaacatccaattccatgtacagtagtccattttctaattctaattgatgtaggtaaacaatagattaagagtgatggtaagtgtctattagacggtgattaaaagctctaaactatacaaacaaaagaaatatttattgcttttgtttgagtcacacatgaaaacaattgatgtatatgtagagatggtgactgattcatgactttattagacggtgattaagaactaaattaaaacacatgcaccatatgtcccttgagtgggacttatttgatccactaacacttaaacaaattgaatgtatacaagcttaattaacataacaaacaaatccagtttgattatattgtatagtttcaatagagacacttcaccttaatgttttctgtcatatcatcgtcttaattaaaaaaataaatggacagatcttatcgagtcttggtaaacagtttcctatcaaagtctagtagtgatctcactgaaggtgccacttgttgagaatattgacaatttagtaataattaactatactgcataataatgaaattaagaagaagaagtgatgagatgtcatcaaccatgaactgtcaagagtttgaggtctagtaatgatctcatatttgcatcatgatgcttgaagttgccaattgctgtcaaacagaatttttttttttttttttttatttttgtcaaacagaatatctttaatgaagtaattagctacatagtacagtcacaaaattaagaaaaggagggatatgccaataaacataagctgaatagcttttctgaaccacagccatgagaaaactacatacttgaatgacatttagatagaaactgagagagtgaaaggtggtacttgcctacttggaccaccaacgtatatataaccaaggcataggcaatatagtaataagtggaggggtaggcgatgagtgttttgttcagattcagcaaaggaaatcaccatacatacaaaatatagctagttccactaatatcagtgtttgtccaaatcctactgctcagaaagggacctgactttcattcctcactagccacaagtataatcataagaaattatcatttgaacattatgtagcaagaatattatcaggtcagtacattgttttgggtatgaagttataagtgatgttcatttatcaagggaattacgacaattgttatggagtgagtgagtctaccaggtatagcccagtaatccgctatagtagaactaactgatcaacaaggtttgatatcttttcccagtgcccacacgtacttctgttgtcatttcccatttttacttataatccctacctcacagaaatttagtacaaaatatttaattaataatgttttatataaatgtgttgggtaagaaaaaatttcttttatcttattttttgtttttacatgtataaaattcagggaatacattcgaaaccattgatccaagaacagga

SEQ ID NO: 14537 - DNA, 2524 bp, Aquilegia coerulea
  Intron number 3 from transcript AcoGoldSmith_v1.006028m (l ocus AcoGoldSmith_v1.006028m.g) derived from phytozome v7. 0 (chr-ID scaffold_17; pos 4186439 to 4188962)
aggtatttgttgcagttattttatttttcattctctgaaatatatatatatatatatattcattgactgatctatgtttagattattatccagtgattaaattagccatcccaaaatgcaatgagcattatcaattggtcccgtcaaactatctcattaatgattagtcctttttttttgaccaaaaattagtttacaataatactctctattactagtatttaaagtttaaaattgctattagaattgaaaaccgccaagttagtggtagtgtaacaagtggaattgctatcaagaattgctatcaaaaattgaaaccgcacaatagtggtattgcaatttagtggaattgctattacaattttttagaattacataattaaaagttagcaattcttagaattgcacatataaataattagcaaatttttagaattggacgtaaagttagcaattttttagaattgcaaagaaagtttgtatgttttaataaaaactataacctatgtatgggtttaatcaaccctagtggatttgaattacttacccaaataatttatagacacccaatcacaaaatatcacatgtcaataattaaatataacctatgtatgggtgtagttaaccctagtagacttaaattagttacccaatccaagtagcaattttttagaattgcaagtatcaatgattagcaattttttggaattgcgtagttaaatagttagcaatttttagaattgcaagtgtgttaatgattagcaatttttagaattccaagtgttaatgattagcaatttttggggattggatagttagcaatattttgaaattgtatagttagatagttaaataaaggaacggttcagagaattaaaacaagaaatcgaaaaaaaaaaaaaatagttgaaaatgttagatgaaatacttacaaatttaaactcaaatttgcaaaacaaaagaacaaagtgtttagatgaaattttatattatgaaagaagaaaacggttggttaagggtagtattgccatttaaaaatgtaaaattttaaagttctagcgggattagtttagtcaaggattggtttataacttttctaaaaaaaaaggatttgacattgtataagattaaaaattgggacttctcattaaagccatagttaaacaggactaattcataaatagggtgggctaaatgggacgtaggactcattctttggattattatctagttgattttttgttcttatttagtcagtagcagacacttgtgagggtgtccaacgttggcacaaagtgtgaagaaactttaactttagccacataacatcaactttcacttcaacgtttgcatgtgccttacatgtgttcaagacataatctagttgaaaatcatttacttgtttttccctttgtttaggtcatgataataataataactttggcattgaaataaaattaatttaaaattggaggaaggcataccgaaaaaaggctttagatgcaattcttatccatggtacggttattctttgccattcttatcatatgctgcgcctgtactcgcagcccatggtaagtttgcccaaatccaatcgattgatatgatcatgttgtggacccataatcattaacaggtatatatatatatatataactgtaactgtaaataactgtaaataagtgtttatcattcagattggcttgaggatatcggtaaataactgtaatggcatgccaatttaacaattcatgaagtgcggtgaaatcgtacaattaacaatttgaaattaattagtcttaaagatttttaactgcagaagaaattgtaaccttcaagttcattctaaagccaattttagcacaaaggttctagaaaagagaggttcttgttttcttccccagttttacattaaaaaagaacagtttctccgttgtgtaacccaaacaagtacgatattatttctataaattgaggaggaagaagaatttgtagtttttcattttctttctcacccgatttgttgttcttctgttgatagttgatcccaagtcattctgtggttgataggcgatctgaaatacaggaggtggattcttcaagaagatatagatggccaataaaatctggtagtctcaaatgaaattggaataaatcctaatttaagttatgattgtatagagtcttaagatatgtaattcaatgaccagtgattgcccataggataatctaaggcacaaaaacattactgtatattagattgcgtcagtttgactattttaatctttgaaagtttcaacaatttgatcaatttattggcctttctgattcagtttgacaacaatgtgtcagtaatatgttaaaatgttttttcttggacatccagggttgagggtgttcacatttcatgcaattagaaatatctttaatattatcagattttctggatgggatattcttgtttagttctcatgaatatacaattcttgttaaattgcttttcaggaattctctcctggatcaa

SEQ ID NO: 14538 - DNA, 1555 bp, Aquilegia coerulea
  Intron number 2 from transcript AcoGoldSmith_v1.011507m (l ocus AcoGoldSmith_v1.011507m.g) derived from phytozome v7. 0 (chr-ID scaffold_20; pos 642920 to 644474 reverse strand )
agtatctctgttgtagctggtaatgccttttttttagcttgggttttgtttaaaggaacaagttttagtctgtttctatcattatttatgggttttgagttgaatttgattttcttctcttagaaggactaaaatgcagtatctgggttttagtgggtttgtttagtttttttaaagttcagatttttttgatcttgctttctcaatgaaaactgtaattccatgaaaattggaattctttatagctcaaactttgttcttaatgtataattttttttttattattattaatttggtagtttggtatttattaacactacaaagttgaatggagtcgatttatcaagggatttttttctttgaaaatgaacattgaaagtatctagtgttgtccaatcacttgatctggcatttgtatgttataaaagttaggactttagaactttgtgaatagacattgctactttatttatcgatgtttgttgtattgaaggcatagatgggaaggttattcagtgaatgccacaatcttgaaacaagcagggcatattcagtattgatgaacaaaaacagttcccattttgacaatataaaccacaccatgtaatggggtattattgtagatcatgcggaaaatatgaacatagatgattaactagtgggtgtcgtccaattgcttagagtgcagtttgcaatagtgcctactctaattgactttttggatgggttgcattatgcaattggcttgtctgaatggacccttggtgtttatcttattaattttattttttcaaggttggtcctattaggacaacttgtgatggagatcccccccctcccctccccacaccctccccacctaaaaattcagtttcatggatgataagattcagacggatatcagtttcgaattgctgatattttgcaagattcttgttaaaaatcagttacttgttactatcttattgtgagcttcacaaagttttctgcagatggtgaacactgggatcgtttgtagatatcttgatgttcctttgacttgaaaaagttgtttaggaacagctacctaaacctgttcactgtagtggtggacttttcatgccacatggttggttaatgtcgccattgcagatcatttatctaaaagaatactgatttgctaaatggatcacatctttgcccatgtttatgttgacctttttcatgcatagttcttttgagcatgatacctgcagtcacttaatatctaaaaatgtgaaatgtaaacaatggctgcagggaaaacaacgtatcccagtgtaaaatttggaaaaagtgtcaaagaactagtttgtcttgctagcccgcaactatatacacttacaaagtatgttcctcttcttagtaactagaaactttgatgtaatccacttggtctttgagttagacataatcacttcagtaatagtattgtttagtgctgcatttactacatagtcgtggtttcttgcctgatctcttttcattaataccttcgcatatccaaattaatttaggtgttgaagccagaggattc

SEQ ID NO: 14539 - DNA, 4146 bp, Aquilegia coerulea
  Intron number 5 from transcript AcoGoldSmith_v1.006145m (l ocus AcoGoldSmith_v1.006145m.g) derived from phytozome v7. 0 (chr-ID scaffold_6; pos 7253072 to 7257217)
gttattaacaagtatgatcctattcttctctaaattcttctgtgattcttttgtttgaagtacttttattccaggtccctgatttatagtctatcactaccatttcaatatttcaagcatatagataccttgtgtgtagtctgtatcctatatccacttttcatgtcaagagcatacatttttatagacattgactttctttatatccaaataataagttaaccctttcatctgttcggatatattcataagtttactagttattctgaagatttcaatctgtgtgctggtgtacgttgggacatagtgataacattttgaataaaattctacaatcatggcctgacttggatgtcagaatttccaatgaggatttcattttataattatgcttttgaatgaatgtgctgcaatgttaagattccatcttactcaagttcatattatgtgcttctcttatgatacactacccatatattgtatatattatttactttttcccgcagtttttaactattgtacttctttgtatctactgacttcctacttctcgacccatctgtctagagctcaatctagtgacgtagaacaatagtaaagtaaataaatttggtaatttacaataaaatttgatgtgaaaaaatagaagatactcgggttccatatagaataccaaactccttagtccttcggaaaaatattagaatgcattgacctgcttccagagagggcacaatgaagagtaatcaatgccggctccattaatgtcggtgaagaacactcaagaaagaagacaatcaagttgattccagagacttcttgctatagagattcctctcttctataagacggttagtgactccttagaatagttcactttcttcttgtatcttcttatataagtcagttacgtaagctaaaaataagggagctggtccttagttgagtatcaaattgagtttgttgtgtttgtgtggcacctatttcatcaagtattagaagtactagtgccttagccggtgctacgcaccggttaattttaatttatccatgtctgattaggattcgagttttaagttataaattttattaaatattataaattacactaatttattaaattgtatgaaatagttatttcttaagtaaattcatttttctcattgtattttgttaattattggaccttttgcacataaataaaaattcagcctataaataataatatgttaaattacaataaaaccattatttaaaaggtattatgtaaatttaccaaaaaaccatgactaaaagggtattttagtcagaattaggtgacaaaattctaaagctcaattctcattaaccgggacttacccctgtgaattttattcaggtttataatagtagtatagatagatatagattatacctgtacccttcagtttcatcaataaacagcaaactttccccagcaatctaagttagatttagagatgcagactgggctggagatccctcagcaagaaggcccactactagttatacccagcttggattcaggtgcagtctcgtggtgcagaagaagcaataaacagttgcattatcatccacagaggtagagtatcaaacaacatcaatggcgtggatgttaactattcagtagggctgataaaccttattagagaatgcatggcttttaaaactaattagagatattggtgtggacgcgaacttttgggtagggctccaatgtgctataagacttgcatcaaatccaatgttccatgccaggactaagcatattgaagttcagcatctctatataagggtaagacggtaaggtactaagtggagaaattgactttgagtctagttagtactgaagaacaataccaagagcttgccagtctcagaacaaaacaagtttctctatctacttgaagtgtatttgatttatccgttggtgagttacctagaatagtcttgcttttgtccttgatcgttggtgtccgttacaaaatatctcgatctgaagatcttgtatattcttgtaactttataagtcggttatgtaaaagttataaataggggagctggtccttagttgggtacaatcaactatcaagttgagtttcttgcgtttgtgtgacattaaagttagataaggcacaagtgttacaaatcttgtatctgtaccattgatttcaccaataaaaagcaaactcttctgtttcttacagatttctttacaattactacacccatgagattaagttgctttctctagctagcagtacaggtcttcaacccatatttggcaacaatgactttcttcaaagaagatccttctcggctccatatttccattgcccatttccctaaatgagtctacctcatatgtaaaagatgccgagagatccattctaattaggtatataaacttggtccctttaagagactagacttcagcttctcctccatgataggccttagtgccttactaaggtgaagagtggagctattttgttttgtagctgtggaccacttttcaaatatggaagtggaacacttccagcgtagtaaaaagtagaaaggcgccaatgcagcccagggggcttatctttacttccgtgatgttgtaaagctcccgagaatctttggtgcatagctgagaaagtgttttgctctatctcaagcttagatcagttatagtaattctgttaatagtctgtaggtttatttatacttggtttacttgctaagaaagttgacaaagtcggttacagatcaaattcataaataaaatatttgttaaactatttccctgatatgtgaggtatgatatcaccacgtagtatcttattggatacatgagtgaagctccagtgatacaagctaggaagactggagaaaaagataaggaaacgtttcttcttgtggattcgaagtttcccaaaagttttgctacagcctacagtccccagaattagattagttttgtgtaggttttggacttttaagcgaattcaaacatgattaataggtttttttattagggtccaatgagatatggattcatggaaagcacagatttgaaatagaacagatcggctatctaatgtgcaaagaaacacatgataaagcatactcggtcgatcttaataaagctcaaattctagaataagtatttttctaattgatcgatcaagtaaagtgttttttttttcattgatttcgtgaagtgtgtttcttcacttttatctgagtgcggaaattttgaaatctgagatgtaatagtatattctaaaattcggaataaaatacactacttattaaatttaaatgagtacaaaaattaatctttaaaaacaaatattcattattattttgattacatttaaacccaaatgctagcatcaagccgttgtcacctaagaatccacatcgcgtccacgtcacaagatgttctattgatccatgcagacttgttatcgccatagtacctccactttccatataccagaccaggcatgtcgcgcaatgaagacttgttttctctatgagtccacttatgtagccacccatcaccttcacattggcacaaagactaatccaccatcgagtaattaaactcctaaagggtacattatttataacaatcttgcaagggaaacccacaacctcccacatttgaagaaatgcacaacccttgaacgaatggctcatgtgctaaaaaaaattggaccatttctcgattccttcattctatccttgcatagaggccatgtgaatcttctctgtatcacttcaagtttattggatgatcccaaaggaacatcaatatgttctgtagtcttcttttggctgtttttgttttcggtttgggctgttgtgggttctttaagatttttagcatataggctgagggtctatgtcttgaaactagcattaattcttcaatcataatctgattatattggcactactttcaagataattttatatttcttatgactatgatgcaactggtaacaagcttatattgcacatgcttctgtggaaacttgttatggatatattggtttgtatatcattcttatctgaccaaacctgttcataatcttaggtgtcgagggatatattgcaactaccataaaactg

SEQ ID NO: 14540 - DNA, 2129 bp, Aquilegia coerulea
  Intron number 3 from transcript AcoGoldSmith_v1.001288m (l ocus AcoGoldSmith_v1.001288m.g) derived from phytozome v7. 0 (chr-ID scaffold_5; pos 3034165 to 3036293 reverse stran d)
aactgaaatctgctgctggtattttatcttgttcttaactcacgaatattctccaattgtgaacattagttatattatgattactgtacatagtgaggaagtttttttttctatttgctttatgctctacatctcttgttccatatttgtgcatttcacctgatactagattccaatgaacttttgtcaacaaaatattgttaaccaatatccccaagggaatgtctgtaatggtgacacatctgcgggtgcaccgttactgtactttcggatctgaatacgtatccctatgagtaggaggaggtcttataaattgactgaccatcccaacaaggcaagtatcttagacaagtgaaagtaagatcctaaagttcattaagggtgcacctgaaataacaaaaagcaaccttaatcccaggaaaataccagagaagacccaaatcctttgcccaaaactcttccctagatgcctctaaactaaaaaatcactcctgtcattgatacacaccacaaaaatgaccttttttttttctcaatgtaactctaaataacgagagacaaaaatgttacaacaaaatggaaaatgatggaaataacaattatatacccctgggacattccagctagatttggcacccccttaagaccacttatcttgtatttatcactatgctcggtgagggacccagcaagatgaaaatagaaacataattacaaatgacacagacatgagcttaaacatactacattcgattgaattaacccccataagatgtccttgttaaaagataaattcctcaagatggtgaccccatctctaattaccaacccaaaacaatagggtatatgtcccacatcgtagtcgcacgcctagcacatgaccttcgacgatgctggatctcaaaatggtctaggtttccaagcccaagtgtttatgtgcccttttaaattgattgcttttgttttaatgtagttattgatggtctaagttcgagtcgaagtaggagttttagggtttctttttataagttgaattagtagtcctcaatcctaactctaaataagggcttgtaatggcaaatgcatcgctattggtagttataatttgatgaattcagaagtaaagtttatatggattttatcgaaaaaacattctccatcaactcagggttttctgttatcttcagtgtatgtcttgtttccgccaagaattacattgctttgcccttgaccgaaacaattctagagttgacattttcacaaatcttgaaccaagcaattgccattactcttaagccagccattcagtgcattgttaacgtcatgacaaaacggatgttccttcacttaaatcctcctacgctaccccagcaactcctacaccttttgaacaagtatgcataatgaaatataatatcctcatctagatattccatctataatagacaacgcatacttaaaagtaggcaccgaaacacacatattatcaaaccattgtcagaaagtaaattgtaatccatttattaaattggttcggattgtaagaggctctagacactttggccaatgcattgcacctttttttttattattattaaagcaccacattattataggaaactcattttcaaaatttctaaaataatctaaatttgcttctcttgcatcttacagactagcataaaaaatgattccacttacaattattaacttaagtggaaaagaactgcgccgacgcttgctgaattctcaagcccaaactattagaaagagttgaaacggttatttatcttttatgttatcctgttaatgcgtttattttgaaagtttgatatgcaaatggcacgggtttttttatagaattagatgtaggaatgatatatgctcagtcgaatccagagttcaggatgaggcatcattgatggttggtttcaaaattgtgaactaacgtttggctccgttttagacatagtaggacacgtatttggtccacagtcttatagcattaaagcaccataatatctgaatttcttggttagttttcttgtgattaaattcaataaaaagtggatatttatcttcgtatctatttcttccgtgcagaactacctttgtacttgatacttggt

SEQ ID NO: 14541 - DNA, 234 bp, Aquilegia coerulea
  Intron number 1 from transcript AcoGoldSmith_v1.008489m (l ocus AcoGoldSmith_v1.008489m.g) derived from phytozome v7. 0 (chr-ID scaffold_4; pos 297487 to 297720 reverse strand)
cttcgtcgttcttcatcatcgatctaatcgacaaggtaaataatcagttttgaaactttcaatttagcttattggatgtagatcggttaagttttgattgcaatttacatatataataataactcgtagttatgtttgagatttggtttaattttgctgaatcaatcaatcaatcgtatgtgtttatgtgtaatttataagtaaactgatttgatttatttcaggtgttttgta

SEQ ID NO: 14542 - DNA, 3848 bp, Aquilegia coerulea
  Intron number 3 from transcript AcoGoldSmith_v1.011918m (l ocus AcoGoldSmith_v1.011918m.g) derived from phytozome v7. 0 (chr-ID scaffold_20; pos 1786387 to 1790234 reverse stra nd)
catccctaaatattttgaaatctgtgcaaaacattgtgaggtttcgttgtgcatttatctttttttttcccctaatgattcttttttttttctttctataaaagcaagataaaaagaattagaggttgtttatttcataatgtataaaatgttcattttctggttaataactatcatagatttttttaaactcggtaagaaacaatatattgactggaacggaaaagaaaagtacaaagggagctcataccttccatacagatcaccccaaaaaatgattcacccgatgacaccttagtaacagcaaggtttaccaacataaaaaaaacgatagaattatgcttcaattcacattcagctatgtactgtagttggttgcattatgcatccccttacttatagcccccatgatctgaccttgttcatctctaaaaatggccccagcccagccttacctggaattcctttcgaagctcgattggtgtttttacctttttgaagccaattgcaggaggttgccatctcagctctcttgtactttgtcctcttggtgcattctctataagttttagagtccttagcatgccatgattttgttgcctattggttccatctgattaaactagttctgcaatagaactagtttaatcagttgatcttaaaccagtaccgcaacgaaggaccaataggcgttagcgattgaatgctctcatagacagagaaaggtgagccagtaagaagagggtaagacccatttcaggctcaagcccccaatagcctttctaatgcctggccagacaccagcaggcttgcgatattgaatccaatcccttgaaatgataacaccttatttgcccaaccaccagttttttccctgaacttgtctattacatcagcgtagtgacttcttttaattcttccctggatcagtgggactcccaaatatttctcaggcaatgagcctaacttcatgttgaaaagttccatgatcctttgttgccagacagctgggatgcacccataaatagcttacttttcttcttactcgcacattggcgagaggcttcctgatagagacacaagaactcattgagctttcttagacctctgattctccatttacaaaaataacaatgtcatccgcgaacaacgagcaagatggccctggcacatctctcgctgtacaaataggtataatgagattttcctcccttagagccaacaaacccctagtaagtgcttcctctgcaatgacaaagagtagaagggaatgtacattgctataattcttgatagcctgttgatcattcaaaagagcaagttcttcagtaaagaaataagtaattgaactatgacaggaatgtacattgcatatagcttgttagtatgccgcgttcctttctgagagctcgaactagttggttccacacttttgcttccaaaaagagtccttgagattcagagcattttcaagggctgactgttgttgtgcactgtatagccacctcatcattggcatacatttcttcagccagtctttgacattcttgcaacctaatttcaggttccttcaccagagagtcaatgtgaccaaactctagtttattccattgctttaactcgtatttcattctttttaatttctgctgaaatttgaacatcggagcaccataaagttgtttctgccaatatgtttcaactgtattgagaaagttgtgaggttgagtccaagctctgttaaatctgaaggtggaatttaaaggcttgggtatgataatactttctccagtgagtggcgtgtgatcagagtttagacgtgcttgcacccaccctatatctccatccctgacacttgtgagaccatttgttgctacaaaacatcctatcaatcctgctatatatgcgccttgcatcaaactggttattacaccaactaaaatttggcccactatatggcacctccataagctctgtagctgggcttatagatattggccacccacccttcttttcttcattgtttagcactacattaaagtcaccacagacaagccatggtctgttgaacagcttccaactcagcccataggactcttctttgacttttgatgctactgcctactggcatgaacaaatgagagtaaatttccattcacttcaactgttatatgttggtgagacttacaaaccaggttgacttgcaagttatctctccatagcacctaaatgttacctaatctggctgattcattgttatgaatcattatgtgtcccatgtgtttaagctttgagctcttaactgctgttacagaggccttgatcatgggttccattagacgtatcatatctgctccaatcttttcatgtaagttgctgagcctggcaatggagctaattgttgccaatgccccttactttccaaaacaagatctcattcgaaaccagttgcctggtctcttgctctagccctagtcactggaatcccagtggttaaggttgttgcttttttgtgtcccttctttttctttggagtaatccagcccacatctgcttccagttgggtggctaaatcctttctatttgcagtattctctaaaaccaaaaatgcttcttgactggcaagagcacctggctcattgtttgttgagttgtccttagtttcttgtacgaagtttaactgacttggttgtgctacaacattacccaactttagttcgactggagttgaagggacgcctactgcctataggactagtgtcatcctccatgaccatgtccgatccacccttatcagcttctacaatggcaagcaagaacattgctatcctgctgcaagtcagctcatttttcagtttcaagtgatgtctggtgaggtgactgcgtcaagactctggtgaattttctgcaccatttgaaaccttagcgccgctggtaccaatgtgcccctttcccccgtgtttatttctttttttattccttttcttcttccatcccattctttctgtggctgtggtctcattgttttcatcctgttttttgtgaatatgcttgcattcaaatgtggtgtgacctatcattttgcaatgcgagcagtatttaaaaagcttggagatgacaatatcctgcaaaaactcttctccaccctccactttaacaagtatcttgtctggaattgatttagagaggtccttgtcaactagaaattatttgatgcaggaaaatttataaaatttatggcccaataagattttcctgcaccttttgagtgagttaattattgcgaatcttcattttccttatgaaattatgaaaatgtgtctttcgttagtaaaatataccataagaaaccgactagtttcctatttatgggtttcagggcatattttgtttttctccctaatgactttacactagaaggagcttgaacatacttgtttcagttcttgttgtgtaacttctcttcttcatgacaaacaaataaattatagttcaattttcttcttataattgggaatcggtatggtgtttcctcagcttcatgaagtgcagaaaaaacaattagtttgctcaatttcaggagtttctttgctcataattgtataagatttggcatatgtagagctgagaaacctggtttatagaataattggccaaagtactaaagttcattgcaatgcaccatataattatattgatcacgtaggattaggtttcatttaggtaggataatatctacttcagtgggattgctttgtagttctcttgcttgagtatttgtgtttaattttcttaaccagtgcatttcttgaacagtgggataaatctgaagatcgaattgctcttgtcgg

SEQ ID NO: 14543 - DNA, 2549 bp, Aquilegia coerulea
  Intron number 2 from transcript AcoGoldSmith_v1.007791m (l ocus AcoGoldSmith_v1.007791m.g) derived from phytozome v7. 0 (chr-ID scaffold_86; pos 394814 to 397362 reverse strand )
gttacaatatacttacgtaaggattcacgtttcaggtacaagttgtgaattgtttccctactttttttttattcttcactcatcagataagatgactttacgttatacggagccttaatgattgaatatgttgcttatattcatttacctttcgcttataatatattttgttaacctttttccacggggaagtagtgaaggtgttcagtagctagctggggttttgtgttttcaggcgtgtgtgttgcacggtgggtggggtgataattttgttggcaaaagtcaggaagtataaagacaagaacaaaaaccgtaaacgaaaaagagtggttgacccgaggtttagatgccacctgcattgttctcgacaacgagaaatgttaagagtcttgagagatccccattgcattgctggcgaaagaaagtttgatcgggagccctgttctctaaccatccaattggtcatagtctgccaagagggcacgcaccttgacctaaggattttctgccctagtccttcattaagtaacatagtggttttaacactaggagtctctttaggtagtcccatgaaacaagttctccctcaagcggagttattattctttcataagaaaaataagacggtcccgcagataggaggagtggatagcgacgccgaagctccaatctcgacctaaccaatttatactctgagttccttacagataaggcttaaatggttacataaatatttaggcctaagaaaattcacgttctgtataaccattttttgtaataaataatgtaacatcgaataaaaaagaccatatctctattcaaattataacctaggtgagtctaggggaatatatatatgaaatagttgaaaccttcaaatgagtttgaaaggtagtgctatgttggtcttaggaaccaataacgccatcaacaagtatgatcatcccattagcgccatccctgcactctgctgctcataattctcaaacaaacaatgatgttgctatggatagtcgccctacattttgaactccatacacgatatccctctccttaagcacatcagtagctgactattgagtgtatgtctatttaccttaacacaacatgattttttctccctttgcaatctgttattggtgataactgataacccttcgtggaaacctcatttaacttcttctgttttagggtagcaaattacgtactacagttctaaatttcaatatgactgtgaaatagggagccagattattgttctgtgtgcattatcaccctcgtaagtagctacttgagtagctttaaatgataggaaattgttagaggtagagttatttgaagagaaagggatgacgttcgttttgtccaaaatgtgtaggaccatattgaggaatttcttttcattcatatactagtgttctcacttgtcattctgcaatgatgaatcttgtcaagtgtttgcttgtctttgtgaactggtgtgcaggataagtcatacactaggttggatatcacttaaaattttggcacattttgaaatgttcatgtaatttcagcctaacaacgataaataatctttgctaaatgtgatttggatattgaaaaagcgttttcatttttgtacttagtattcatttgtcgttttagttggaacgtggaagtacttggtgaacctgttttaaagatgtaccaatatagattatttcaacgttcttatctcataaatggtttattcattttgttgaagctatttctttccatttttataaattagtatgtcctcagttgaaactgcaaaagccccattatcccttcaatagtgtgccacattagtcactttagtgccttatacatgctggtctaaaggttatgtactagtattatgcatacaaaaactataatcaagagaatattcaaatcaaattttctattaattttctctttgtagacttgtgataatatatataaagatatgaattagagttcctcaatgaatttgtattacatattggaaactgtttagttttaccctactaaataggccaaacataaataccatacgaagaagaaacaatagatctctaataagattttgattgcaattaggaaactctagctgtactttcataactcgagaaaagaaagatttcttttttgtcaactataatgttatatttatatgctttgaaaatttgcaatgcacagttaagttgtgttattgcaattgtgtttttgaagagatcgattggcagcattaatacttaaccgactcaacttggcacatttttcagcttctaatggtaaatgttgtgatttcctctctacgaatttcaatcatcatagaagattttttttttttgataaagtatcatgttgaagatttgtattgtgacacatgtgagtatgatttcctctcttgacaactcactatatgcattttcttaggcggttaggcctaattcagtacgtgtcatcatttcagactatgctgccaaatatttcttctttattagcttgcctggtttgctttgcagctaaggatctttcca

SEQ ID NO: 14544 - DNA, 2125 bp, Aquilegia coerulea
  Intron number 4 from transcript AcoGoldSmith_v1.023169m (l ocus AcoGoldSmith_v1.023169m.g) derived from phytozome v7. 0 (chr-ID scaffold_3; pos 1648196 to 1650320 reverse stran d)
ggccccgtcctactttgcaggtatttgtaattgttattcttttacccattatatgtattttccggaaagaaaatacaggaagaaaccctgaaaaattcccccatcattctttgacacagcctactttttcaaaagcacaaggaaagtcgtgtcaaaagacaagattgccttctacaataatagggttccatggggattgctgaaaaacaagagatctccaagatgttgttaataaatacaacttttcttttctgaatggcaatggccaggaagatgcaactgagagcatttctcaattattattcccctgctactttaagtagttaagataacaaacaaaaaaatagtgttctttctgttaggaataaccacttaggaatatccaagccattttatattttaagtcaacaataatatctcgtaagttacaggtgtttaccaaaaaaagaaaaagaaaccattaatgttttatgcacaagaagctggtcagtgttctgtccctccgtcagggtggcttgtgccacggtgccactgtcacctatggaaagcataacttaactggaatgttcagatgaattttcatttctaaatttttgtttccacctcaccaaatgagtcacctgcgggtaagatgtcttcaatgaaatcgtatggtttctcaatcatctaatcatcaacttcataccttagttagacacaaaatctgactcatcagaaatttcacagggagtattatcctaccttttctccttttatttcatcaccccaaaagagtatatgtcccatcattcagagctgttggaagtaagggtattgtaggctttaggtgtgtagtttagtcccactttgcttagatataaagtctgtggtttctctctctatatatagagtcaacggctttattactccaaaatcagccttctttcgtcttggagtacctcatctttattggtttttgaagttatatcagatgctttgtggaaagtaaaccctagccaccgaaacgaacatgaccctagcaatcaccaccactacctcctacgtctttctttgctgagcagctggttatccctgctcctttattgtctctgcagctggacatccctgcagacggttcttctcgcagctggtcatccctgccattgaacatttttcctagtgttgttcacaagatactttatgggggatgtaagagaacttctttgtatttcaagctgaaattcagagtctgaatgttcagcatgagggggagtgttggaagtatgggtattgtaggctttagttgtgtagtttagtcccacatagcttagatataaagtctatgtggtttctctgtctctatatatagagagttagcttctttgtaagcttaacctaattactttcaatattatcattcatcttttatttttctagtagagcaaaggggattccattaatgaagttagcactacagtataaatatgactaattttgactcagtgacgatgttcaatgctttgctaatggttgtatttgaaattttatgttcatgcttctttttttctttcatttgagaaaacctacctgacacatcaccccccaaaaaggtgtttgccccatcattcagagcaaaggagatacaataccatactaccattaacaaagttagaactacaatcaaaatatagacagaatatgactagtgttgatgttggttatattaaatattatggctacccagaggttgagtagataagaatcctatacccacgcttgttactacatatatcctatgtgacataaatgactagtgtgtagatacctgtcctttgatgtcaattccttttgtactacaatcatatataagattgtaggacaactaactgagatcaaaggacaaatatttgaaacctttttgttgaaggctacttgaggatctgaacaggtactgagactgttgtttctggtatataacttgacaatgagatcctgagtacattaatatgatgttccgcacagctcaagtttggttatttggtttaacatataaacttacttgatatttttatgattttaagagatatatgtctacctgttttgtcaaataggtagaagagcttctgcgttggaaagctgcaaaaga

SEQ ID NO: 14545 - DNA, 1960 bp, Aquilegia coerulea
  Intron number 7 from transcript AcoGoldSmith_v1.019258m (l ocus AcoGoldSmith_v1.019258m.g) derived from phytozome v7. 0 (chr-ID scaffold_10; pos 2721593 to 2723552)
cagcaaggataacattcatagtctggtatattttggtgagtcatgatctttctatcacattttatttataaataattaagagcacagaatgttttgtttgggggttacattataagtgcaaggtcaagtttaagctataacctttgtgtatgacattaggcagatgagcaggttgaatgcccatgttaacaatatattgaactaatgtatcctagtcctttttaaggtacccaatcttattcccaaaatgtaatcgtttacattctcgtaggtgatagcagtaaaaagttgtttctttcggtatgaatagaaggacatcccttttgagtcctttgtgttctcttgtcacagaattttgtttgggacgaatgtccccaggtaaagtgtagaagcatttgcttttctgataggtgtatgggatgataataagcgctctgttaatctcggacttttgtgagtaggtgaacaagagctaaggcaaaagagctgaatattcctagagtcacactagagttactaaggtcacacctagaggcagtttcacacgttgtaagtcttgaacatatcttctttttactgatatggaaatgtcctagatttctgatcaacaacatcgtaacctgttatgaattttgggaattttgtagacactagatatgcatcaatgttttgtgcatacttgatatattaaattacaaaaatcaaatgaaagttcatgctatggaagcttaagcacctagtgcccagggacacataaccttctcatgtgaaattcatagggaacgactaacttggtaaaccatggagctccgtttgtttttcatgcaactcctacatgtcacattctcttgcttgtagagttgtagtgattttattgagtttctgtcagaggcatggagtacaatgccaagttatacaaagcactctgacttagtgcgtcagtggcctgatgctcaagagaatgtctccattgatacagcacctgtctacttcatgcaactctgtatatgtagaggtttctaccttcattaaggttttcacaatgatgtgtgatttgatgctagatgcccagcttaaggacacgcggtggataacttgagaggcaccacgagctacctcaaagacctggggaattttcggtagctaaagagcctcagccatctgctgatgagttgggacgttttagttgtagcttatgactaatcacactgatctttaggcttcactattgctggtgtttcaatttcctcatttaccctgttataaaaatcccctttcctacagatctaatgcttgagtggaactttttcatgtgacaaactgaacgagtcatgtttagacaaatttatagcgcctcatagctgcttgcatcagagcctcatatttttagctgtgattttcacttcaaaatgatgcttttcataagcttcctagcaaacaaatcggaaacttcattcttgaaagtccctgattttagatctactgacccgcaccgatggtctctattttgattgggtattttaattgacctctgttgcaaatatataggtgcatgattcaacccaccctttagacagcagaaaacatgcagcaggatctttgtttttggatggacaaaatcagttttatatgttgccaatcctgaattcttcccttttctttaatgaacttaagaaggcacattcatttcatgcttgagaacagactttaaatgcttagaggaatatattgtttgcaactttgctttccatgttatttcctcaggttttgcaatttatctgttctaatccagtcactgttgggcagactttatatgcttagaggaatatcttgattgtttgcgactttggttttaatgttcttttcctccgatttaataatgtattgttctaattataatcactgtaattttttgtcttgatcagactcaattgagaggttccacatttccgcattcatt

SEQ ID NO: 14546 - DNA, 1066 bp, Aquilegia coerulea
  Intron number 2 from transcript AcoGoldSmith_v1.008854m (l ocus AcoGoldSmith_v1.008854m.g) derived from phytozome v7. 0 (chr-ID scaffold_2; pos 8633795 to 8634860 reverse stran d)
atttatactttcacctggtggctctgtaactgccggtacgtctgtatttcctcagtgatcagaagaatgactataaaaacgatctatgccattttcttactaagttctcctttcatgaatcattacaatcttcctaaaatttattcttgagtagtgatcatttataggttgatttgttgatatgataatgatagtgtaaatcatcacccctcgccccttcccaggtaagggttttttttttttttttttccttttaaaaattcagtaccaaaaaataattcgttagagattgaggttgtttgagtaatgctacatcactgctgagttgtaatgctctgattaggactatagcatgtatggagaaatttttatcattaggaatcctagtccccacaggctcataaattggtgcgaaatgtttgactgtgaggtgtaattctcttaatagacataatggacattaattcttttaacttaaagcagattttggtagtaatgatctacttgtctgccttttagcctgagtctcagtgcactttgtcatgggtttgtggtaggtgaaactgcaaagttgatcactggtgaggaatgcaggaacagtgtattcttagtttcttacatctctgcttatgcaagatctgaaggattagatcataggacattttgatgagaataaacaaactggttttaagtttatagtaaaatggaaatcaacagaggcccgaatatgactactcactactgccaagcaattcctcaataagtttcaatttatgtagttctgtatatattccctttgagtatacttttggtaacaggatgttggtgaccacacctgcaaattgatttttgccttcatcatctatttttttattcagagtgtagtttgtgttacagagtcaggttttacttgcagcactgataacctgtattgcaatcatcattgtcagagtatagttttctaatttgggtttttaggatcttcatatcttacttgggacgtggtagtttcacttgttctttaatagtgaaagtttagttttctaatttgctaatgcattcagca

SEQ ID NO: 14547 - DNA, 1739 bp, Aquilegia coerulea
  Intron number 2 from transcript AcoGoldSmith_v1.009962m (l ocus AcoGoldSmith_v1.009962m.g) derived from phytozome v7. 0 (chr-ID scaffold_1; pos 10605246 to 10606984)
aacccactgatcctcgtctccaccctctatttagggtaagatattcttaacaccatgaagaaggcctggctcttctttctaaatcaagagtatgtttattacttgatttttgggtaaaaccttacattattgatttattatttgaataataccactgactttctgcttatatgctatatacataactacataaggcatacacactagcatacgtctgtccatattatgcacaaccaaactctattttgataatgtgaaaattgtttagggcatgatctccttgtgtatgtatgtgtatgtgttgggggggggggggattaaagggagagaccattactatcaatgctttcaattccactagccatgttccataagagcaatcccaatggcagggcatttgggaagggcagtagtgccaaatgccctccaaacaaaaaaacctctcccaatgagaaggtgggtcaagaattcaacgtgtagttgaactcacgttgtgatttcaaagggggagaaactgccatccaaaatgacatgttgatgatataagacggaaattgaagttttgtcaaattcacttttcggaacttacatttccgtcttatgaactttcttttgaattcggaatttgcacttctgtcttataaacttttattaaatttgaaacttgtagttccgtcttataaatcctctggaaactgaagttccgtcttacagattatctttaattcatcggattcgaagttccgtcttatatactcttttaattgtataaaatgacattgttcattttttccattggctcacctatgtggggtgttttaacgaccatggggaggaggtgagttcaaaggtggttcgattgatgtggcctccacataggtgccacataagctaaaccaccattgaaatcaccttctacccatggtggtcaaaactcaaaacccccgacaaagttgtgccaacgggaaaatttagaaatgtcagtttacatgattaaatggggttataagacggaactccatattccgataattagaaattataagacggaactgtattttccggtatatacaattgtaagatggaaggttgtgttccatttttcaattagacagaaacccaagttccgttttaaaagcccaacccatatacataaatattagacataagaaggaacactactttctgtttataagacggaacttgaagttccaaatctaaaaaataagacggaacaccaaattccgaaaagtatttgaaacggaacattgtattccgtcttatactattaacatgtcattttggatggcgttttatcaccctatgaaatcacattcgagcttctattgcccattgagtgtttgacccaccttcccattggcagaggttttttggcttggagggcatttcatgttaccacccctcccaaatgccctcccattgggattgctgtaatgttccttttgaatatagcaatttatactgatacgtacaaatgtctgtagagtattttatactgtacttcataataaccagagttgattctatgtgatttataatactttactgatcagtttatgatatttttttctgaaatggtcctatacggctatacttattaattactagtgttacaattgtttaaattggcgtggacatttttcattcttttaaacggtacaattgtgtgggttttcatggtagactgcaaaggagaactttgaactggctctggaagt

SEQ ID NO: 14548 - DNA, 1739 bp, Aquilegia coerulea
  Intron number 4 from transcript AcoGoldSmith_v1.000924m (l ocus AcoGoldSmith_v1.000924m.g) derived from phytozome v7. 0 (chr-ID scaffold_1; pos 8984374 to 8986112)
aaaagaggtgactggatttgcccaaagtaagtttgagtcttgacccaccttattctaattctctttattttaaccaaaacaaccctatcattgaatttatgaacacttctttcatggatgtagacgtttttatgtagcgatcccaccctcaacgcgcacacgcacacccacacacacacacccacatcttacccacctatccacacatacagcaactgtggacattttgtggaacaaaaagcaacaggacggttgttaataaattatatatcttaatttttagcagacaatgagggtagagaactgatatgatcccataatgattgttttctcctaagtgatagttttgatctcacaaattgcgttggatgtagagtggtctgagaaaatctcttatggatgtagagctttgggctattccaggttgggcggtggactacttattatttgaaatatggatccttttctccgtcacaagcatgcggatttgtagcttagccccagtaaattgcctacgagtttgaccatcgaaaggcgttcccctttggtagtcatttgttgtggctagtaatcactagttgcatttcaaggatatcattgcagatctccagaatgtcatttcaaatataaagctccaccatttcttttgtttttgttatctctggattaccgcggcatttggcatttagtgctttctcacttgaacgttatctcagccatctttcattactcttttgatcggctaaagtttccaccttgggtagcttttttttgttcgtatgctcagggtgttggagaggggggtggggggttgcttccagaacattttagactaaggagggtgattggtgaggatactaaggtgtaggaatagaaagatattgaaagagatcttagtttgtagtaaagcgaaatttcatatctgtaaggagaggttaaaggtaaggtgcttggccccacaacctactgtaggctgcaggaaggcaaacacctcattgatataaccttttattcccaaacagaagctccgctttaaaaatcactaagatcgaccagaagactaaacaaccttagaagacatttactacatacgcagatacgctatggtattcaatatacgtgagtttagcgttcaaatcatacgaaacacatgtgcagttgccagttggacgagaattttggggatttgtaattgtaactaaagaaggcataactgaaagcactaatcatgttcattaatatgaatctaacacctatgtaaacaacatctacagaaccttgattccagaatccctgaatacttgggcagctacctggcatcattagtgtagccacctaaatcacaaacaaacctaatccttgtcttcttttaatttattacttttattatggagaacaaaacttttatgaggttttgacctgtagacttatattgattagtgacaactagagcaccgatatatctgtagctctacccagatttgcactgggctcttaactacaacgataccttgttcagctgcacagagagtgtacattattccttccagagaaacattttcaccgtgatgcttgttattcttcatctcatattttgctctaaaattttgaaaggttagttcctgtggttatctagaacaaatgattttgaaaagaggttatttattctttaggtcttgctttcacactatgctcctttaatgtggccttcatattcatttttgagcaggtgcagtttc

SEQ ID NO: 14549 - DNA, 2993 bp, Aquilegia coerulea
  Intron number 2 from transcript AcoGoldSmith_v1.012246m (l ocus AcoGoldSmith_v1.012219m.g) derived from phytozome v7. 0 (chr-ID scaffold_7; pos 6110954 to 6113946)
acttaacgctcgtgcgtgttgtgaactctctcagggtaccttcttccgttcttgtccagatcgctagtattttttttttcatttgtgagtcattactaattaattaattacttgtttctttttaaaaatttgggattttttttatttatttatcttgttttgtttgtttgatacgtttttttgttttgtcaagtgttagggtttttgtagggttttgtgaatgttttttaaagttttgatttaataagaaataaaaattggttgagattgataggaattggagatgatgggtaatgaagaccgatgcggcaatttgtcaaacacttggtgtgcaactaatgtcgcattttaggttcttttttttttaacctcttgtttcttttttctgtcataaatttaaataaaatggaataacattattgaatttgtaaatgcaatacacagaatcaagtggaaaaggataatgaattactgagtagaaaattccttcaaagtccaaacttcaaacctttttgtgtcaagactcaagagttgatacatgaatgccctcttatatatgtacacaaaatgtttttgtttttaattattctatttgattctatgtagaagaccattaaatattggcataccgtattatgtgtaaatttatactttgttataccattgtctacttcgtacaaatagtgtgtctacttcccctgaaacagtcattaaaaattgtgctactttaacttattgtcgtgtttattatttttctgtatctttgctaagatttaagggggtccaaatatgtgattatacataggataaaggggcgaggatacccaatatgatcatattattacaaatgtctatgctattttacacaagaaatggcagtacatatgatattatctctttttttgttcctgctaggtacgtaaccgccaaactgactatggtgagtttcaaaaccttcatgatttgtctctaagagccattaatatcatacctaattttcttagatccccatctttggcgtgcgagtcattccggttttaggaaaatcattgtctatgattcaacaacatggttgttacccaaacatgtttaccatattcagtacttattagctatctatgttatgtatatgactgtgtctagagtgtaggcatgacaaacccattttcatttcgctttgatatctctcaatgatttactatacctggaagcttagtatctttagcttgctcatgatttagtgttttctttttgtgtttgcttttaaacttggagtcctatcatcatttagtatatatgaataatgtttctagaaattaaggcaaacgatcaaaagataaatattctaatggattcaacaaattcgtctatatagccacttaacaagatacgtttttaggatcttgtcctgatgattggtgagcagaagtaaatcagaaatgtgaacgtcttccaaagtatcacaccatcttaattggtgactcggcggtgatgtatttttggaccgaggtgatttgagagtagtatatatatttattcttttattgacatagaaagtaaatctttttaggcaacctagaaagtatgggttacattacatccaacacaaaaattgaagagaagatgccctgacaaattcatagatcatgtggctaggttccatcatcttcctattaaatattctttttaacaattcaagcaaagctctaaaggaacaacaaatggaaagaagcaaggagatcctattaccttattaccaggaaggccaaaatacaagttggagtggaaagaaagaagtcagctaaatagtaagaataaaagattaataatgtttgtttcgcttagaaacttcgtctatggtgagctctagggaagcgagccaaccaaaaagaacatgaaatagctatggacttcaaattgtagagccaacgaagttggaggatgaacaggcctgataaggattatgatttccggtgggattgtgttttaaaatctttggaatgcataagttactagatcttgtagttttgatttgattcttgatgttgtacaattcagagggggttgaaccatttggccacaagcccacaatgacaacaatatcttttgtaaattcaatgatgcctgcccaatcagtagcctgaaaatgggatgcaccaaagaaagtccagagaaaacatttgtaaactatgcagatgctctgacaaggtcctaacactcggtgtgttatcgagacctgatgctatacttatcgttgcttttctatctttcattcattgagatccaaagtacaatttatatgtgtctggttaaagatgaaactttactgagataaagtgatctagcttgcgatatcctttacaagacaaccacaaagtctggtatccaatcccataaatcaatttgtgatcccatacatgatacaaggatcccttgattaagcaaccaaccaatcaaaatgcatgtttttgaactccttgtcaccttttgaacaatttatacccactcacttgttatcgtatctaagaatctcacttgatctttttcatatcgggtaaattatacgacttgtcttgtactgattataatgtggtagtaaattgtatattgttttggttttttacacaagcgaagcaatatcttggaagctcagatcttgctttatgctgaaaccttcctctttgttatgaagtctcttagctctgtaatatattgcagttaattactaaatatgcaaacctactatgtagtcagtgtgattcatcgcttcacgtttttccctcattccttgtaggcttgtacactgcatacgctgaaagttacaggggccacaaaattatagttatttcggattatatgcatagatatagataaactaattcttgaattcacgtatttctattgcacatatgggtgatccattatagtatcagtatcctgtttgatacttgctttcccattgatgtagataactgtattttgtaggtacttga

SEQ ID NO: 14550 - DNA, 3539 bp, Aquilegia coerulea
  Intron number 2 from transcript AcoGoldSmith_v1.008651m (l ocus AcoGoldSmith_v1.008651m.g) derived from phytozome v7. 0 (chr-ID scaffold_7; pos 215933 to 219471)
aaagtaagcttcccgtaattttgaaatttgcctgtcttgcgcaaaatagtgctacacggataatgtgttttttgttgacttaaatactgcctgtgcttttatggggcatactattactggagggttgaatactagaatagtttatacattgcaatggtcttttggtgagttggtgttaagtggatttttttccttgaaatagctgaaggccagaggtgggcaaaatacttgcagtgggtgacaacttttctcatttatcagtgcaagaggattatttattctgacaccaattttagtagtatttattttgaagcagcgagatatagacacttaagaatttcattttagaattgagtcagatccaatttacttatttttattttaagaagggggagtgttctatataaaattacaaattattgggttgtgtagaatagttgcttgctaatcttcatgtgggcttcttcttgatgtattcctttgcttacatttaacaaaaaaaaaacaaaaacctcttatttaataactattagaaaataaatataaaatcatcattcatcagtagttttccacattatgaaattttctgctgttgtgatccatcgtgatgcatatgcataaagatagcatgtgcaaggcacatgcctcatagttcctgcaaaatcctatatggattagaatatccctagtagtagtttctatttacttagctttctagtgtagttaggattaagtttaggttattataaataggggattgcaaaccctattaagtaggttagattgaagatttgtttatgtcttgagacattaaattcgtttttgtgaagaaccctagtttttgggtgttcaaaccatttatttaattggtgttcttattattgtttgcttccgccgatagtattacatcaaaattggtatcaagagcttgtttttttctgggtttagaagataaaaacctgattttttttataagagccgcgttcatgttggtgatttgaagatgagttatcgtagaagaggtcaaagagaattttcgccgccgtcggatctttggagtttataagaattgaaacgatataccgattctgaatataaagctccaaactttgatcctagccgccgcttttctttttccagaaggtatgaacctccctcttcctctcgttccccttctcccccacacagacaacgtcgtattattatgacgatggatattattcccaccaccagcaggacacgcaccctcctcgatgtggttttcagcagcaatatgttgcttatggtgctaaatattcccatggaaaccgtccaaagacttatgatcacgatggtcttcgtagtcgcaattctaaggttactccgtatggagaatacccacactatattgaatctgaaatcgattctaagagcgatgagtctatgattgattatgaagaagatgagttttctgacggggaaagttattatgaagataattattcagatgataatgattctgtgtgttgaatgttctgatgatgaaattagtgcagaatttgagtttggtgatgcccccgctaacaagagtttggttgcagcccttgcaccgtcaaacctctacacatccacctcagttgttcacccatcacaagtttctaatagcgacaaccagcagattttactgctgcagcagcctcattatccggatgatgcctctatgacgtcaccaaacatacaaaaaggtttgaaggaacttttaaattgctttactaaattaaaaagtcaatttgcgtcttttaaggaagaatttgttgaagaagagaaacgacttgacaaagaagcggagattaatttcttactcaacatgtttgaagaagaaaaatacgtcactcgtactcgaattggtggtttacaaagttacaatcttgttgatttattttccgtttttggtgatgatagtgatgatacatctagttttgtgtctcttgagttagaagttgcatgtgtggatcaagtagaagatttgattgaaaaatctgcaagggagataaataagaagttctatttgttgcccaagcaaggaaacctggttgttgtccatgacaatggtaaagaggatgaacgttctcgaaatttcgctcatcactcccatgaatcgatgaattccattgattccgaccgacatattgatgatttttatcatccccacaaattctgtcccataaaagtaattggtaatttgtttggtggttatgttgatccttatctattccaagatgagaatggattttctccatggagggacaaacaccttcaattcttatttcttgacatgcagttatattgttccaatcaattgggttgtcctaatgatgcacctatgacattaatgtccatcattctttctgcgagcaactatctagggaagattcatggccggattttctgcaccaacgtaaggttgaggttgatgtacaagagtcgttttgaactttggaggatgttagtacacaaactcgaggacgagtttttttcaagttggggggatttgatgcatatgcataaagatagcatgtgcaaaggcacatgcctcatagttcctgcagaatcctatatggattggaacatccctagtagtagtttctatttacttagctttctagtgtagttaggattaggtttaggttattataaataggggattgcaaaccctattaagtaggttagattgaagatttgtttatgtcttgagacataaaattcgtttttgtgaagaaccctagtttttgggtgttcaaaccatttatttaattggtgttcttattattgtttgcttccgccgatagtattacatcacattgctttcaaccaggggtctgttctaccatagttagcttctggatattgtgaaatgtatgcttctaaattaagtaatgcagggagcagtgagcactagcttaatgtgaagaattaagtagccttttgtaattttgaagatgtgcaaaaaattcagggatttgtcttatttaaaatttacatcaaatggcatgcttattagaggtacacagcgggggtttaaagcggattcaaccattcaattagaatatatatatgttccaccaaaaaaaaaaaaaaaaaaatagaatatatgttacatcaaacttcgctcgggtaaattgataatggtgatctgtcacatttacatgacctagagcaatgtccatgtaaaagttgattattacgatccagtattcttgatttgtataaatgatatttcccggccaacgttcatatgtctcactacactcgtttctccaaatatataacaagtatgatggaagtattcccactgcatatggcatatttgggtcaaatgaaataagtcatgatacacatacaccaacgtatgtgtctgtgttccataaaaaaaaataaaaaatccaacgtatgtgtctgtatttgcttgctataatctttggtaaaacagtttgtagcttcctgaaatcttgaacgaattctttttgcagtactggattttttaagtgacgaagcagtcg

SEQ ID NO: 14551 - DNA, 1142 bp, Aquilegia coerulea
  Intron number 1 from transcript AcoGoldSmith_v1.001286m (l ocus AcoGoldSmith_v1.001286m.g) derived from phytozome v7. 0 (chr-ID scaffold_14; pos 5452065 to 5453206 reverse stra nd)
tacaaactttttattctatcaaactcatcaatcaggtaattgcaatgaaaaactaataatacccatttcttcttttgcttttatctttattgggattgttttaattcttcataattctacttctttttcatgttttgagacatgggattggttttggttttttttttttagtttagattcaatctctttgaaatgcacagatagatggttttttccatttcttttcttcagaattgagtgaacaagctaaagtttgagacttttgattgtaagttttatggatttcttagttactttttgtttgaagttgaattcctggttaattcagatttaatctctgtttttttttcgtgaggttccagagtaaaaacttcatgatttgtgctcaattctgaagaaacccaaagccttctgaggctttgatttgttggtatattcaattcaataggacaattgagttcatcttttaagaactacttttttttttatttcaattggggatggcttggttggtttagttcagatttgctcttttctatattcatcatagacttgggttttagcatttttcgccactaaggttagattacattcaatcttggaattttttttgaagtttaagagttctgttgtctgaaaccataatgtaaacacggcaaactactagaaatttgttgtaaggtctctcgaaaaatcaaacaatcgtcatattttttatttggatcttaattttccgttgtgtagacattgttgttctaatcagagtttagacatattttcgataaagttttcttctttctttaattttctgtatatgcacgatattcatttggtagagagtttcaaggttgttcaagttgtttttttatatttccttcaatatgttggttgctagttgagcctgtagttggaatagttattgcttataacgagtttctgagattgaagtttgcatttgaatacataatatcctctattgattctctttatgctgtaatacaaatttaatttgcatttgaatacataatatcctctaggaagaattataattgttcctcgatttgcattgagtagtacaggagttttttgcttgagttgatgcttaatgaggttctctaattgcaggtcgtccagaaactaag

SEQ ID NO: 14552 - DNA, 3936 bp, Aquilegia coerulea
  Intron number 5 from transcript AcoGoldSmith_v1.011686m (l ocus AcoGoldSmith_v1.011175m.g) derived from phytozome v7. 0 (chr-ID scaffold_3; pos 3002472 to 3006407 reverse stran d)
ttataactaggttcagcattgtggaccttttacgggtatattttagtctctgccactgtatgatagatcctcacctaagcaatatgatagatcaaaagaattaaggaatggtgtggctcctttaattatattatattttgctacttttatgtttggatgtctgtggtagtgtgattgtaagccacattccttaacttcttatagattttaaatatattttgtggttctctcgctctagtgtggttgtgctctcagttgaggcatatgattttgtgaattatatattgtgtgtaaacttaatattactgtttatttaagtaatataatatatatttatcgaaatatatattttcttacattcatatattattttgtcttagtttgtagtgtctttgcttcgtcttcttattggttagtgacacagattttgttcacaaggagaatacccagtagtatttgtatcgtgacaaagagtcaaaggctaagactcttttgtaggccaatgctattgtcacgtaacatgattcccccatttttttatgaaatcaagatgtgtagattgatgtccaactgactaagaggttaatagaatcagtggatatcatgcttagttaaacaccattttattttattgcaatacccttggttgcatcaactaacagaaatgggaaaaggtagctgcttagaattttaagaattgccaaatgggtcttagtaaccttggggtttgatcttggagggatataaatctacctttcatattattggtgcggttccgaccgtcagttttaaatgggttgatttcttggacggaaacacaaacctgtcatcttttatatgcagtctaggctctaggttttagttattcagaaggaaaacaaaaggaaataaaactatgtagaaatgtcttcagactatgactgttgaatttctttaacttgtattaccgattacttgtttttgtgatttgctttagttttcatgacgcagaatcactctctttataagctcaagataatactcactcagaaacttcctggtgaataggtggagcctgcatataatttactctcttagaacaagcatgattttttaggatgttgaaatcatggctaataggcttttgcccttctgatttacatagtgagaataggtgcatttggacttgtcagcttttattatttgctcccaccatactaaattgcatcatcagttggcatgttagccctaactaaattgtgacgaagttgaggaaaagatgtaaattttttgtcatttgttaataattattgctgaaaacctgtttttacttccacagtacctatgtgttttcttgagaacttgaggatccttaacgttattgaagatgcccttggttatgcctttgcactttgtctgaactgcctataatgatataatcatttacatcttggcaatccttttgtttctcttattgagttagccatcttcggaaattgtctaggggtgtttggctatttccttatttcgaaacaaagaaatctgcaaagctgttgatagacatgttttagaggtgtccatggccctcactctagctttaagctgactaggaaaagcttacaagattttgtattgtgtgttctcaaagcatctccaatgcttacataaatacctttttttgtataaattttgaatgtggtctaagagcatcttcaatactttcttaattttatggagccacatgtaggacaatttggagaaagtatgtagtaaattcaacctggaaaatcaacagcttcaatgttttaataaatttctgtaacggtgcgacttcagcaaggccaccacgcaactctaacaaattattttttatcttttttttaagaggatgtgaggctgaactaaggaaaaatcatatgcatggacttaccaaagccacatgaacttgtagaagtcacatgtcagatttgttgcctttgtctccgtttatttgttattccctaatccctatatagtaaggagataaaataggatttgtcagactcacagtatgttgccttgctaaagccgtgtggatgtggtaatgccataccattatagaaactttatgaaagttcttgggattgaagctgttatttttcttagtttaatttgctaaattttttcttaaaattgctatgttgttctataaatattaagagagcattgaagatgctcttattctttataattgattgtgcactaacaatttacccggtccaaagtggaggaatagaaagctccctttttggttttctgattttgtcaattgtgtaaatcatctggttgaaatttttgtttatagttgtgcatctttatagatgtattgtccaaattagatattacattttgatcaatgtggacggtgagactaggtttttgttggtaaaggtgagactagatgcaatccttttgtttcttgttcagttttcactatgttcaaattttgataccctatagtaaaacatgcataactttgtgttcggtgctccgaatggcgatccgtcttttgagttggaaagcagacttctctggctttccaacgatatatggcacgtttcgtggtttactgaagtctattgggaaaacagctttgaagttctgacaggcaacaagttaggcatattttgggcccacgatgtggtaaacctaatttccttgatgtttttatatagtgtatcacaagaaaattaggtttaccatgtcatggacccaaaatgtgccgaatctgctgcctagcttattgctgcctgtcagaaatccaagtctgttttcccaacagactacagtgaaccacgaagcgtgccatatacctttggaaagttagagaactctgctttccaatccaaaagacgaatcgtcattccgagcactaagcacaaagttatgcgtgtttttactacagggtatcaaaactgaacatagcgaaaacttaacatttctcttattgagttagccatctttggaagttgtctagggtgtttggctgtttccttatttcaaaacaaagaaatctgcaaagctgttgggagacatgttttaaaggtctacgtggtccttgatctagctttaagctgaccaggaaaaacttgcaagttttgtaatgtgtgttcttggagcatcttcaggttccttttttgtataaatttattgaatgggtctaaaagcatcttcaatactctcttaacttaatggagccacatgcaggacaatttggagaaagtttgtagtaaatttaacttggaaaatcaacagcctcaacgttgatagtatttctataacggtgtggcttcagcaagaccatgcgactttgacaaatcctattatctccttgttttaagggaatgtgatgctgaactaaggaaaaatcatctgcacgggacttaccaaagccacacggacttgtggaagtcgggcatgtcagactttttgcccttttctcaatttatttgttattccccttataataaggagataaaataggatttgtcacagtcatgttgccttgctaaagtcttgtggatttgctaatgccataccattataaaatatttatgaaagctgttgggattgaagctgttgtttttcttagtaaatttgctaaaatcaagagagcattgaagatgctcttattctatagttgattgtgcactaacaatttacccagtccaaagtggaggaatagaaggttcccttttttgttttctgattttgtagattgtgtaaatcatctgggtgaaatatttgtttgtagttttgcatctttatagatgtattgtccaaattaaatattatcttttcattttcataaatgtggacggtgagactagatgcaagatctcaagtacatactgatcaaataacttttcacatacatgtgtagggattctctgctggttgtgaatctagtgcagtagt

SEQ ID NO: 14553 - DNA, 2026 bp, Aquilegia coerulea
  Intron number 5 from transcript AcoGoldSmith_v1.010305m (l ocus AcoGoldSmith_v1.010305m.g) derived from phytozome v7. 0 (chr-ID scaffold_22; pos 3359227 to 3361252 reverse stra nd)
aggtactgctttagcttcaatcttctcttagttttggaaatgtataatctttgtcaattgtagttgagtttgtgttctcttaggagtgtctagcttgtgagttattaaacattaaagtatcagggaaatcagataagatctgcagttctgaaaaccgaataatgatgctttacacttttaccacatcaatttatgaatattcctcaaggataaagtcgagcagagggggttgacattttttactggattgaccaaattttttgtacatttgaaatcttttttacttgttcttagccttttaccacatctagaaaaaataaaacctggtttaattaatgcttagtggctaagtagtcataccagttgttactgtatatgtatgccttttggttaaatagcttaagactcgcacagtgaatttgtaaggtctttgaaactaaaatgcttttagctggaaacgtttttttatcctaaaattactgcctatagaaagtgatatcaggctttatggcccacccactctctctctcaaaatttagctgggcttgacttgcatctttaaaaattagaaatcatgttcatcgaaaccagagataaattcagcagcttgacttgcaatgtatgacttgtgtaagagaggttaagtcacgtccctcagatgtgtcatctgcaacaatgacaacgaatccatccacaatctcttctgagattatggtgtagctatttcagtgtgggcacatattgggtacttcttttggaaggtttcatttcatcatagactggacatagacatgttgaggtggaaggctgtagtttataataccttaatgtattcgtgttttcatttggagatgttgtgggaaggatgtgaaattgatcaatacctatttacaatgaaaggcaagaaattgagaggtcaagaatagggtgggtgggtggggggttccgcatctgtaatgcctctagaattacagattgagaacttcatttatcattgtctaatacagttagattatgctacatacgtagtctgcatcctattattcgtaaaacagtcatgttttttctaagaccaggtgggtgctacaagttacgagtgaacaaaatagaatcgatgatatgcgacttaacaaaaagttttcaaggttgaaaatgtaatctatatgaattgcagtacatgaggttctgttaagccactaactacatgttattggtacaactgttaatcaataatcattaacaatccctttactttcaaacctggtgaaggtgggagttgatccgcaccttgagccccaacccccctaggctgagaacactggacatttttctatcaatccactaacgtcattgacctgtttgtagaaggatgagctgttgaagacatttagaatatctatattaatatttagagtattgataagatggctctagatttaggaaagttgatgccaaggtgtaaactcagtgtcatatgaaatttatttgacctagttcttgatatcgtttctcagagaaactttgtagctgcagtttaattctagctgttgggctgcagcctgcaacgatagtatctgcaaggaaaataatggcaatgccttatcccaaacgttggcaagaatgtcttattattcaaagccatagatttcgggaattaacgttcttttgcggtcactgcctcagttaatcttatctactgtctacccaatttttaaactctgaagaatctttgcctacctaatctggagccatgaggagtttagattctatcgtgccaaactatctaaagcaactattacttaatttaccacctataatggcaagttaactctgtagaattttttgtaatagattttacctttttcttacaactctctagaatattcttttactaaatttacctttcagttttattcgaatggtggtcacatagttctcccaagccataccttcaaagttcaaccatcttatagtgttttattgtaattactagtagattgtatcgttttgggttcagctgttcagc

SEQ ID NO: 14554 - DNA, 1063 bp, Aquilegia coerulea
  Intron number 1 from transcript AcoGoldSmith_v1.005832m (l ocus AcoGoldSmith_v1.004336m.g) derived from phytozome v7. 0 (chr-ID scaffold_6; pos 2214503 to 2215565 reverse stran d)
tttggttggaagaaggtctatagctgaagggtaaggtaagttattattatgttttaagcttaaagtttcaatcttttgggggttttgttttttaattgaaaatcaatttgttgttattttcttgattatacataagctatatatactatggaaaaaaaaaaaaaatgctacactacattgtttactatgatgtttgcaagtctcaatatgggttttggttatttgttttgaaacacagatattactgcaaagaatggagattttattggcccaactgactaacgtgaaatccacataccttattggaataacacattataatttcagtgtgcactggtcagtggtcaaggataaatctctttgtgataataagagggaaacggtgaactacccagtatagacattggctccatctattgatatagtggatcatcgggttttttttttaaaaggaaaaggtttatatgatttaattatagcaatttataaacagtttaagctatactttaacactggacttcttatgtaaagttctttgttggaaaaaaatttgttattttgtttttgacaaccatttaacttttgtcctgtgttcatacaaaataagcaccttattctcacattttgaacacattgttattttgttaagtttaatgttagatgaggagctttcgacttcattttttgagaaaatttctttgggaagtaaagtaaaatataaaaaatagaaagaacaaatacttaataacacaattctaacagtaatacatctacaaacttataatatatttttgtatagaataattcttataatatagatgtctcatgtgattacttattttcagtcctcccctcttcttttaacaggtttaagatattatgggcttgacaaactcatatagtcaaatatagatagatattcttgaaatatatttggcaaaattatattagattggatcccactcccatttgcaatttgaattggtgaacacgtcattgatctgcagtaactttaatatctggtgcagggtaccaaagtcggatttggatatatttggatata

SEQ ID NO: 14555 - DNA, 1927 bp, Aquilegia coerulea
  Intron number 2 from transcript AcoGoldSmith_v1.002033m (l ocus AcoGoldSmith_v1.002033m.g) derived from phytozome v7. 0 (chr-ID scaffold_1; pos 2487855 to 2489781 reverse stran d)
caacttgttactccttggactttctctgttgcaaggtgagaaagattttgtaaaatgtttctttgttttttattgattttggatttttttttttttattccaaagattgaggaaatatgtttagattcgttagatgatcctcgaattgcgtataatgatatgtccaatggtttagatacagacaaaatagaggaaaaaaaaccctactctattagatttgtttagttttttagtcacttggtaatttttatttttttttaccattttgatttgaatttatattataaagttaataagaaattaataatttattggtagatcttgattctgtttattggattttctctggtaagaatatcacagagattttctctgttaagaatctcggcagtaactattgtttattattatttaaaattaatagaaaaattgggaatctggtttgttctttttttttttttgcgaatgggcctgtggctcaatggtagcacccctctcacaaagtggagaggttgtggttcgaaacatgtcaacagttgattgtcgatataagtttccacaggtaatttaaaaagaggtaagggtcctctcaaccctgcttgccaatcaaaaaaaaaaaaaaaaaggtttgcctgtcagacattatttaaaaggcaaatttgtcatagtgaagccatctatataataaaaaatttccttgatgatttctttttgttcaagttttccttgtttggttggaatgtgcagtctttggctggcttctaatgatttattgattttcactctatatacaattttctttatggtttcttgaagactcgagttgattgtggaaaatggaaaatatttcgtttgtgctagtattaaatactgcattttatgtctttgtgtcatgtttttataatggttgaactagtcaagtagaaaaggcacacttttttcattagtcaatgtttctgtagttgtttatccagttttacctgaaatttttggtgattgcgatattagaatgtagaaacattcttggatggactagaaatcccaatggcttaatcttgaccttaatgatatagctatttggcatgaccgcatgaaaactagaaagaacgtcgacctttgtaagagaaattaattacatatccgaatataaacaacggtttagcacaatggtctgcttcatagttcatataatctttgcagtacaaacatatactccctccgtcccaaattataagtaccttttggaatattctacttattaaggaaacatcatttattgtttttctactaactctattttctaatttattcctatttaatactaattacaatgtctaacttttcatttgaataatttctctaatctcaaagcaagggtattatagacaaatgaactatttaacttaattaatatgtgttaaaagtcaaaaaccacgtatattttggaacaatctaaaatggaataaggtacttataaattgggacagagggagtaacaaagtagctttgcctcagtctcttgttcgcttccacagtactacaccctgcacacgcacacacacacacacacaaggtttatttaatttactctctggcaattctacctgctgaaattaaagaatctttgcatcttcatcacatctctgatgtctacattggttttatactttattttgtttctattttggttaaccaaagtgaaattctcacttttaacttgcacatttgtaagttgtactaaactactaatcagggtcactttaatcaaacctcagtgaacactacaattctcatagttattatatatttcaactgggaaccattagcaattgaactgactatgtatgttatatatatacaaaatctaaatttctttattcatcggcttttagtggatacacgttattgagggatccacaccacaaca

SEQ ID NO: 14556 - DNA, 3007 bp, Aquilegia coerulea
  Intron number 3 from transcript AcoGoldSmith_v1.024796m (l ocus AcoGoldSmith_v1.024796m.g) derived from phytozome v7. 0 (chr-ID scaffold_54; pos 97012 to 100018)
ggagctattgttggtgggattcctccacttcttgggtaaatttctttatctaattcagtatcatggggttcttccatattttataaggtgtttcttttgcatgtatgtttataaatcttatagtcattcgatatttgagatttcttagttatcttggtcataagcaatacctatgcatatggaccttcatattggttcaaagagcaaactataagataagtggaatattagtagtggaacacagtaatccttacattgaagtggatctctcaagggaaaaggtttctgaagatttggatatcaaacaaactgccacatcataaaatcacagtaaattaacgtatttagcactatcatttcgaagtattttcttttagtctgttattttcttacatgatctaaacaaaatatttcttctgttcccggtaatttttaggagtcaccatttcctctttttgacgaaacaaagcaacccttgccagtgccgtacctgagattttgggggccctagtttttttcttaaacgtcaagatacctaaggcccttaaatttatttaatataacacaaaaaattaaataataatgtacacctatcattgaatttgaagaatatctgtgcagttatattagattggccttaagtttatttaagataacagaaaaaattaaataataatgtacacatatcgatgaagttgaggaatatatttgcagttatattagattgagatttttgtttgattaattgagagaagagaaaacagaaaaaatgaatttaggtttttgttctaggagagatgagctatggaagtgagaaagaaaacaattacaatatgtcaagaggcctaataaattgaactgggcttcaattgaatgagagagtctcctcccatttggtttattaattgtattgggcttgggcagtaggctttattatagttaaactaccaaaaaaatatccaaagcaatataacatatgtatggtcttggtgagcaggaggccccccgcgatctggaggccctaggcaaccgcctagctcgcctagccccaaatccggccctgacccttgctctgtatcccacttgtttcttcaaggcagcaattcatataagttattaaaattcaaatttacaacggatctaaatccaatgttttttttttgattggtaaatccaatgttttcttttcagaatccctaataacagtaataactaataagtgatgccttttttatcgattgtctaaaacatttgctttactgaatcttttgtatttaagtcaagtgaacagagagtgcaacagtggtgactgctttacacattagaaagattgtactgtgagattaaaattcatagcagattttggatttgctattttgaatctcaatttaaatagtttatcatgcaataacaaaaaggaaaagaaaccagaacaatacaagttatgactcaaaaagtgtgattatgtcgctaagagacaaggcgaccagggagttgttccaaacctatgggcacgatcttagtgttctgttctaaaatcttattagttaaggtgttttaacatgttggacttggatcttactgacctgggattaattagagtatgttgtaagtaattcggtctgtctatcaaaggatttgaaactgctatgaagttactactgaagttccaattttagagaaaacaaaattagacgatggatgttgctgatttgaaatgaaacaacctatataaattgttgtcttaaagagatgattggaaaaccaagcaagatttgttttgtttccttaagaagaggaaagtgacttggttcttcatttgaagatttatgaaaaatgtaactaaaatcgggatttgaaatggaataggatctgtcttgtttaaaaaaaaaaatcgcatgaccaaaatgacagaatgcaatctttaggttaagttgcaaaccacgattatatttagcattgtgcgattcagatatgcctcgtagaaaagctttttttttttttttttaaaattttttgtttttctcatgcttgcttttcactttcaaattttaaaaatagacttgtgaagacttaatgagagatcgaaacccttgggtgagtgaaccacattgtcgaaggagaaaccctttcgtgaacacgaaccatgagttaacctcctctggctttcattgccccatcttttgataactaaaaggtgactcctggctaatcgtaattgaacttaaggaaaactgattctttaaaaaacccaaagcacatttgggttttttcaaccagggatgaaaacttcaaaacttcttaatggatatctctattgtgaccatctaataaaggctcttttgttccccaaatatatttaaagcatttgtagatcggcaaataaccatattttgatggaattgtagcactgaaggttaacatgtattattaaagtctaaatttggcatgaatgtttcatattcgtaagtttatatataattatatattacatattatgtttatagctctatcattaatgattcgatttacgttaggattctgactgttaaaattttgctatttactagtctacacactgaaattatgtgggaaggaagagacatgaagcatttgttgtatgtaagagaagagacacattagtaaagaccaaagaaacagactagaaagatatcatggcaaaaaatgtgtgttttccaggaaatcagtttttcggaagaaccggtttgggtttttcgggagacagaagggcatatatccgagatttgttcacgcaaaccaaaacataatatactccttgaattctgtgtggatctgttctattcttttcttttcaattgtaacccatgacaaaaatacattcatatgagcaaacggaaaggatgcgtattgttacatcttaggtcacatgattctttggtttatttaatttatatgtatgctcacacggcattatctgttctcttggtcattaggtgggctgctgcttctggtcagatctcgctca

SEQ ID NO: 14557 - DNA, 1727 bp, Aquilegia coerulea
  Intron number 6 from transcript AcoGoldSmith_v1.000773m (l ocus AcoGoldSmith_v1.000773m.g) derived from phytozome v7. 0 (chr-ID scaffold_1; pos 7117096 to 7118822)
ctattgtacaaggtaaattatgttttacacattggctagaactcgtagatttgttgaatgtcaaatttacctttgaggcacatgttgtaataattttttgacacccagaaagttcatattctgctaacttttaattgtaatgtttgcaaatagaatattggttacattcaagtatttgtaggacaagtgttggttatgtgtcagaaaaggagcctaacatgtaaatatgcatctatttattttttgttactgtgattggaaaatgttctttcgattgtcttccatgagttacatatatcgatagtcgtttagtattttgacctttttattgaaatattatttgccctaaatctctaccctcccgtgaaggtgggactcaatcccaataccttggtcccaacctcccaagtcttgaccagtaatctagatcttcatgctgattgggctatcattctcactccatattttccagcttaatctcacttcatttggttttctctgttgatattcatctctgtattattggttagcttggactgtgactctctcactcacagctcctgctattttgttgtacaacccaccttgtaaactctttccaaagcaataataaaagtgctacatataaaaaaaaacaatctagaacaacactctgcacacatatctcaggactctgccaaaattgctttacccatgaaacacagggcctatttcaggggttggaagatgagaatgatttggatcgacacctagaatgaagagggtaaagtctagagtttaaattaggttaaaggatgtcggggggtggagggtgggagtgggttggtatgaacattgtcaaattctgtgttgttcagggtgtgggttaggaacttaggatagactgttagctctgggctagagggctatggcctttacgtaatcctgtttgaatatggtaataaatatattttttatctatacataaattaatataaactgtacatgtaaatgtttgggcgatggtaaatgtctttgaattgagcgtttgttcatttttcctctctcaaacttattctccaaaatatgtaaagttaatacagatcatgaaactacatttgcatggttttataccttcttagtacaacaatctcaatcgaataaaatgctgcgtaacaacaaagagggcttgctgtagttatttgtgtagaagtgtagaaccattgtactatggtagcaactgtttccatgatttaataggttcaagccgaggcttggggttttttaactttttcttgtgtgtttgaaatatttactcaatgaagtagggattatttgggtctctttcgttaatcaagattttcattgagatcatgatggcatttctctcctcatgactgattcgtgttgtctagttttctacactctgaagttaccatgtatacatttcacacaattgcaatattacagactcacaaataagaaaaatttaaagtattgataatgagttcctacgtacgaccatttggccttaatatatcttgaaagcccgacatatttgtattttatttcatttatgttaattagttctcttatttgacaaaccaaaatattattgatatatttagtagttttaaaattgcaattcttatatacttagtagtcttaatgatacagtcttcttggttaataaagttatgtacttatgtctgcacatggattcttatgcagatatctgtgttagaaga

SEQ ID NO: 14558 - DNA, 1166 bp, Aquilegia coerulea
  Intron number 1 from transcript AcoGoldSmith_v1.004236m (l ocus AcoGoldSmith_v1.004236m.g) derived from phytozome v7. 0 (chr-ID scaffold_49; pos 551418 to 552583 reverse strand )
tctctgcatctctcatcgctcagaaactgtaagtttaactctctctctctctctcttaaatctagggtttcatggtgaatctatgatttgtttttcttttttcaaactctttgatttagttcattttcttgttttacgaacaaacgaacttcacctatctttaacgaattaacgaatatagttaaggctaggatttaatctttctatattaagtaattcgtgttcgattcatgttctttaaagcttgaggtgttcgtatgtgattttgtttatatcagatgagttgatagagcttcgaaactcgtgtagactgctttatagtgttgttcttatttgtaaaatttgatctgtctcaaaagaatatatgtcaccaccataggcttggatttatctaaattacgaactcccaacctgtttttgtttcacatgttgttcaaaattgtgggtttttttgttcatattcgattaaaagtgacatctgtttcaattaagaggtttggatatcttgaacgcaactagcaatcataaattggtcgaggattttgtggggaagtttaagatgaggacaaatataaaggaaaacaaaacaaaaaaaaaactggctcacttcgtgatttgcttatacatactaagcactattgctttgggcaacattttcacataggcgcaagtcttgtgtgcctaggcgtgtctgattgcatgtgtcacccgtatctgttggcaataattttttctaggcgtgcttgtatattccatgtattgagataaaacttaacaaaatgaagtatgtttataataaattgatatatcattatatcctgtacaaggagaggaaaattagctttgtgttatcagattcatatgtgaaagtatattgattctctctataaccatttgtaatttttcttgacggtttgctcatctgtgctaataaattaaggggctgcagttcttctttctagatggtaggttgtttttaaattgtatggttttagctttgcttttatgatgggacaatttatttaacttcttgaagattttatgttttattctttggattcagaatttgtagatattcagatttttaaaaacttttatcatgtatgaaattgtctgtgacttcccctcaaatttattcatgaattataaatttttgttcttgcagt

SEQ ID NO: 14559 - DNA, 3173 bp, Aquilegia coerulea
  Intron number 2 from transcript AcoGoldSmith_v1.007862m (l ocus AcoGoldSmith_v1.007862m.g) derived from phytozome v7. 0 (chr-ID scaffold_45; pos 740779 to 743951)
aagatttcaagggacattgttgattcaagtgggtgagtttcttgtttcatatgtttaattgggtatgttttcatttgtttttatttgcactaaattgatcaaaatttgcgtgttttgttctatgggcatttaaattttgtggaattaagtgatgggtagttactgttttaagctttagtacattgctttgttggcattggttttgatttaagttcatttattacgtgattttgttagtaatgtcacttttctgctgacattaagttgttgatattgtaggtacttataggaagaaaaactatttgagcaaatattaggtcttatttgcattataataggattggatagatcgatagctgtgattattagtgtcagtgttgtggatattgggatacaaatttatttgaatgattctgtaccatactatttatatggctgtacctttgttgacgattgttgacgaaacacatagacttaggggtgtgattaagacatttttagggttgcaatgaacgtagaactttgtttgctcaatgaacgaaatatgcgagttttattctatgatcatttcaattgtatgtgaaattgaatgatgggtagttactgctttaagctttagtgcattgctttgttggcattagtttcgatttaagtgcatttattgcatgattttgtcgtaatgtcgcgtttctgctgacaataggttgttgatattgtaggtacttttaggaagaaaaacaatttgagcagatataaggtcttatttgcattaaataggattggatagatggatagctgtgattttttagtgctagtgttgtgaatagtatactgggatatgaatttatttgaatgattctatatcatactgtttatatggttgtacctttgttgacaaaacacgtagatttagggttgtgattaagacaaatttagggttgcaatgaacgtagaactttatgttctcaattataatttttattttttcttattgaacataaagtgaattgaaacagaataaagtgagcagttagcaacagaatatgagggatggacaacatacagagtcattattctaagagaaacaagtcagcaattgattacagtatggttgttgcattagataacttaagaacaaagcacctcaaacactgatatagttggtggtagtgtcgctcactgaagaaatggacattggagagcaggagagggaaaaaaatgcatagatatagatgaagggtatatactgagaaacggagaagggggttaaaagagcgagcagaaaggtctgtctatgctttagggtttacagatacaaacagaaagcacagctatggatgacaaaaaaaattcaaacatattgccaaatttacctgtagttccatagacaccatggcctactcaacggtttaatgtatcaacgtctaacaacatgcttactcgaagtcctgatccacaacaccaatcctgtagagctatgtgttaatttcttacctgccataagatttgccacacgacgggagaaaggtgtgtgtgtggaattgggggggcggtgatgtgatttgtggtttgaaggtcatgaaaggcatcaaagctacttgtcaagccaccttgcaccttagcaatcaccaggttcctattgtcatgtctcagataattaacatattggaacttggatggacaaggacgtgctcacataatagctttatgtgtttccactttccagttgcatcttgactcttgagtggaaaagactagggtcttaacacaaagtagagagtttgaaatagaggattggagaaaagtaaatgctagttaaccctatgtgtccatttggtgacgcttatcttgggattttttgttttatatattatttgtgacacttatcttcaaagtttgctcgaagtgtgaagcactgtggatctaatataagatttgtttttctaataaataaatacgtgaataaaaatgcgaggatctaatttatatagtaacaacagttccatatatgtgggaggtgccatgcagatttaaaggaaatctgtagatgtaaatgcaggttgagacaacgttcttcagtcattctagatgagattttagtacgtggatagttggttactggcgtgacactataagatatatttcacctgacattttgtataaaacaataaattggcagggcagtcaggtgtactggaggtctcagattcaatacttgttgcaggtgtgttttgtttgtgttgtcttgtatttttttactttccctatgttctttgttttccaaattgagtttacaagaccaaaaggagacataaccccccccccccataaattggaggtcctgaagtgtgtgcctcaaactatgtgtaatacgccaccttagctagatagaagagtgaacttgtctcactatgtgaatatgtaatataacatcgaggtggatactaaactttcacatggaaaatgtttttgcatggataaatattgtcttcctatcagcattccctccattataatccacgacattgctgatcactagatttctgatcgtaaaactgggatgcattgaagaaaggtttaggggtttttttccacaaaaacaaagacagccaagcctttgtggaaccgctagatatcctcagagcctcagactgagctctttgttggtaaggaggtaagttttgtgttacatcccttgaccttattgatagttattcgttaactgggaaaagaacctcaatgcacttgagcttaaatctggcatcttatgggaatgtgaggtaaagcctttatctatcttcagttgagtagtggtgacggttgcctttgagggagactattggtttttgcagaatccaactactgaacgaggtgtgatctcagttccagatccaatgaagctagacatgatggattcgtttgctttactttagcttgttcttttcatatagtttgaatagcgatatggctctaacaaaaactatgggagaaaactggctatacttttggataatgtgccgtgatgggatgcagcactatttctgatgacttgccaagttatatattatgcctttttgtagatacttctaactgacaacttatcaatgaagctaagttccattgttttcttttatgcaggaaatccacacaagtagaagaaattttgacgatag

SEQ ID NO: 14560 - DNA, 1154 bp, Aquilegia coerulea
  Intron number 4 from transcript AcoGoldSmith_v1.009601m (l ocus AcoGoldSmith_v1.009601m.g) derived from phytozome v7. 0 (chr-ID scaffold_4; pos 1961649 to 1962802 reverse stran d)
aggtatgcatctattttggactatattttgcacagtttttggagaagttggaagctttgccaaagttgtccattgcttgagttagttgtgttctaaccctctaaaattttataagaatgtaaggtgtgaccaacttgtaaggcgtattttctttgttatgggttttaggtttgaaatcttttagtgagttattttgcatctaataatatacaagcataccatagaatggattaaagctggatacggaggtcctggcactggcaccaatattgtctgtttacatatttactaattgatctattcttcttaattttaaatatgatgaaagcctatttgatagaatttaggagatttgaactttaaaagttgcttttagacattatggatccgtggcagaaagagtaggaattttttattggtgtgtggaaatttgagatgttttgcctatatgactaactgaaactcaccctgctccagcggaacttcctaaggaatagctaatgaacggatactattttgaaaataatgtaacatctcagcatgtgtggttgaaaatagttaaacatctggaccatgcttgctaaatgcatttgttttcagtagcacgacaacagtaacctaattaatttgcgcaagtgcttagtcttgttcgggaaagctctgcattgtgattcaggaccaagtttgctgcattagttttccgcccccgatgcctaatgaattggaataaaatcattttttcactttaatcaagacaatagcgcatattcttcttattggttgttgaccacttttaattactactttgcaatcaaaatagaaaattggtggttctctactctatgtttcacaaatcacaactttgggccttgggggtggtttttaaattgtgaatggctgcaatagttaaaacagagagaaactagtgcagtttataataactttaaatgttatgtagaacttccatagaattaaatttaccctacaacaatagcggaaagggatggtctttgacccttgatatcacaacttctagcagtgttcaaattagtccgacatgtctatattaaacatagacaaaaggttttagtggtgcagcttatattattagtgatgtttattatgtagatttttcttactctagcttttgcagg

SEQ ID NO: 14561 - DNA, 1089 bp, Aquilegia coerulea
  Intron number 1 from transcript AcoGoldSmith_v1.002714m (l ocus AcoGoldSmith_v1.002714m.g) derived from phytozome v7. 0 (chr-ID scaffold_20; pos 4032726 to 4033814 reverse stra nd)
cattttggtgagtttgtaagcttataacagtattgctattaggttagcttcctggtaacaaaaaaatgactttgcatgtctgatgacgtgcataatgtgtaccatcttgcaggatgcgtgcttattggggtcattagaagatggtctaaatgccctattgaacattgaagtaagtataatgtttatcaatggaactagagactatcaaacaagtcttgtctggggttgtcatactgttgcttttattttttgtaagggtttaattattagactatcaaggtaacagtttagagaagtacagtaggaagaagtataaagccatatgaacaaacgccaatgtgagaattataaatgtaaaaatcatttgacacaaagcatttcagattaaggatccgttcggtaaacctccagaaatgcatttctttccttttagaaagtaagaaagtaataagcttgttcggtaatggagaaagaaaatctaggaagtaatttctgaaaagttaaaagaggaattatacatgaagtttttattaatagctttctacttattacttttccttttgtagaaaacttctttttgagaaattccttcgaatattttttctgttgccgaacgtcccctcaaaaaaagggtcaacagatatctgcacctgtatgctgttttagctatatttcaatttgtttatcaaattgctagttagaacgtggaattaaacaaagcagcgtatgataagcagaataaacaatcatcttcctggggtcgactcatctagttcatgaacactggttcttttttattgatgtcatataacgtcagcaagtggttgtttctagcgtcaggaagaacccatgtaaagagtccagatgattgggtcactccataaataaagttagattgtttatctagatttatggttggaaggactatcaatatctttcataactctgtgatggttacactcattctaacaagggagggtaatataattgagaggaatatcttttttctttatttctactacggcattagtctgactactggctgttgttgcagatacgtggaagtaaacttcgtagtcgggtcaggta

SEQ ID NO: 14562 - DNA, 3221 bp, Aquilegia coerulea
  Intron number 3 from transcript AcoGoldSmith_v1.007350m (l ocus AcoGoldSmith_v1.007350m.g) derived from phytozome v7. 0 (chr-ID scaffold_45; pos 489255 to 492475 reverse strand )
tgtgccacgcattggtcacatccagtcttttaaaggtattgtccatcttgatgtaattggatgttttcttatctgtttagatgtgtgaaactaaattgacaattttcgagtgtgatttcaacatatgggacttgtcactcatcttttgtgattctttatatgcaaacctttataatcgtgaacaaacaccgaagtttgacagtttcaagaagtacgacttgttcgttttaccaatggtctgataacaaacttaagaagcttgaaacattgtatagctgcaataattatttatggaacaagctacctcgttaacaaagattagttacagatttctcatgcaattacagcaccctcgttgtacaaactctctggaattatattttggggggattgagtactttgtattggattaaatcaccttcacattggtgtttgaattcttttggtagattccataattcttaaactaattcaactaataaaataacaaaattcatgcttaaatttcgcctgtgagttgtaacatgccttcaggcaagcgcactctcaatcccctggaatacatctcaaggggcacaattgtaaacatcttaactggcaaagttgactagatcaccacattggaattgtttagagttaaggtttggagcaaaaggcaacaagaattaagcttaactgtggcgcgtcagacactcagatgctgcctggtaggtttgacctggaagcccagggcataagtatgaaaaggaaacatggatgtcaggatgttattgctactggacttgaccagcttccagtagcagatgcctgacatccaccctctcatagtcctatacttaggttctctctgacttcctatggcaacataatgaaggctatgtgatgcagtcgtgcataaagatatgtactttgaaccgaattcaaagaactatgacgattttcgggattcgacaaccaatgttcttaaccaagaactcatacaaagagaagactcttctcaaaacacacaattcaattacccaatcaacacctatttggccaatggcctacaactctttaaataggaaaaacaatccttggaaaacaaggaaacctaaacctagaccaattctaatgaaaatagaaaacataattcgaaattaaaataaccctaaaatagaaataccctaaaacacctaaaaacatcaattaaacataaacctaaaaatccctaataattctaaaaacatgtagtagcaatcttagcacaaagtaggggttttaaaccctagaatgcatcagctctccccgggttcgaaaaagttcgtccacgaacttgaatctttcaaattcaccaaaagcagtagtagttgcacgttggtgctgcaagctcgaacttggcctatgtaaatcaaggagtctacctcgaattcttcccaaaaatctgctcactctcataagaagcaatagcccaaaaagttgaattcttccacgaactttacttgcataaaaatcaaattttaggaacctcacaaaacaatgatacttgaaacacaaaatccccaactgtttttcatgaaaagaaggaacatgttgctgaaaattggctacaaaagtttcccaaatcggatcaacacatacgccaaattctttaaaaaacacatcttcaacaacatctacgggttcttcctcaaagagcggaaaaaattcattcaattcgaatgtttttgaactatgaaacttggttcttgtaacctcctctttttcggcaaagacatcaaaaaaatcacataaatatcgacatccttgttttgtaaattcttccatggattctttgtaaacctggcacgcatgacatgtagcttcaaattcttcttgtgatgtgcaaggcctagttgaaagaagaacaaatttcttggctttccacagaatactataaccattatgttgcacattaaacgttgcattcgtttctaatgtccatggatttcccaacaaaagatgacatgcatccgtgtcgactatattacaccacacccgatcaactatatctcaatggaaaaagcaaccaagcaattgttttcaaccacttccaattgtaatttctcaaccgctagtcttgaaacaaaattactattatttttagggtcgatcacaaaagaacacaacttgcctccaatagtacacaaagaacgaaaagcatgattctgaatccaatccttataccaattctccatttaatgtaaactaataccaacgaatatgaccaaggaaaaaaaaaatttgaattttgttctacgatgaccaataaacaatgaacagtaactcgacctttttgatgaacagtacacgtgaacagtaaactgtggacaccaaatttgcaaaactggatactgtgaacagtaactcgatgaacagtaactcgattttttttttttttttttaaatacctcaaacaaagcagcggaagactttgaaaagagtggtggcagcggcagcacgtgaaacaacgatgaagatgaaaaaaaattcaggatttttgagaacttagaagcctcaaaaccttgctctgattaccaatttgatgcagtcgtgcataaagatatgtactttgaaccgaattcaaagaactatgacgattttcgggattcgacaaccaatgttcttaaccaagaactcacacaaagagaagactcttctcaaaacacacaattcaattaaccaatcaacacctatttggccaatggcctacaactctttaaataggaaaaacaatccttggaaaacaaggaaacctaaacctagaccaattctaatgaaaatagaaaacataattcgaaattaaaataaccctaaaatagaaataacttaaaacacctaaaaacatcaattaaacataaacctaaaaatccctaataattctaaaaacatgtagtagcaatcttagcacaaagtaggggttttaaaccctagaatgcatcactatgtagagatagacttggtgaaacactagaaacactctttgcaagcccaagattccctcttctctctgctcttttatccttttcttagttttgccttatttccatgcctattcatgggtctacccatcactgtccaggtcgactgaacactataagatccattgcaatcattactaagtccttatacccacacaatttaaccattaaatgatcactgtgctaggctgtaggtgtaggctctttctcagcaagcactgt

SEQ ID NO: 14563 - DNA, 1035 bp, Aquilegia coerulea
  Intron number 1 from transcript AcoGoldSmith_v1.021555m (l ocus AcoGoldSmith_v1.021555m.g) derived from phytozome v7. 0 (chr-ID scaffold_42; pos 2272405 to 2273439 reverse stra nd)
ttcaccaccaccaccaaatacaaacaccaacagaggtaagtatatatgttattgtgacagaagttgttatagtttcttaactagatttagttagatttttagcgttgagccaactcttatgcattttaattctgagtttatttccaacatccgatggctctcctcgtgtggtaataatgtgacagagtcatggcccatatggactgttcttgttctgggtaacgaccaacacagaatactggtaggctttgcaatatttgtagaatttagtaacactagctgctttattagttcatttttaggccattttgaagatataggtcatttcactgcaagaaattttaaatgtataaattaagttctaaatataaacttctgcaatcagttattattttgaacttagatttacctttggaacaccgtattcttaaccgcggtgcatcatcaatctttatagttgaacttgactcccagagtgtatctaaccaagtatttgttataactaaccatgttattattaaaatgttgatttgtaactacgacactgatagttatatttcaccagggccaaagacagattcatcaaaaaaagttgtcgctatagtagtctctatagtaatggcagtgatactattttcaactattgctgtctacctttatttgcgaagaatgaaggagcctgagaaaaaagttgatggtatttagctgcgattcatacatacactacttgaaatttatcagtaattcctttcctttagaaattatcatgcattcctaatgtgtattatgatgattgttgttattgcaattacaaagaggtggaagatataggaagtacagaactgcagttcaacttgaggaccatacgagatgccacaaacaacttctgtgataccaacaagcttggaaaaggtggcttttgaattgtttacaaggtagtattttctgtaaataaaggttatatacttttgtcaatatcttataattatttatggagaaaaataagaaagacgctatcttttctttttggttgaa

SEQ ID NO: 14564 - DNA, 1517 bp, Aquilegia coerulea
  Intron number 1 from transcript AcoGoldSmith_v1.001875m (l ocus AcoGoldSmith_v1.001875m.g) derived from phytozome v7. 0 (chr-ID scaffold_7; pos 5609548 to 5611064 reverse stran d)
ttacgcttatattaactacagcaacacccaaggtaaattttttgaaatttgtttattttgttgattagatgtattggagttttctttatgcgatcatttctgtgctgattgtgtggtataatgtgtttgtattccttaataattgttgtctaaatatttttatgagtaaataattttgatactcattgaaacatactatgaagagcctgaaaccctaggctagtatgtggagaaaacatttttctaaatttgttaaatgatttctgtaaatgacaatttgaaacaattatgctgatagagataggtatggacagctgaggttaatttgcaaatgatgctggatgggtgaattgttgtattatataatatgacaaacacatttatcctggacttaaaattgtttgaggaaagtgtatgtgcaagagtgtttttgattcagattgctttagatacagtccaagtttgagataagaatgcagtctgccacctaatagttcaactataaaatgtacgtctttgaagggcatggagagttttaagcagtcgaacaatatgaacatttggccaagtctgcttgtaactgtcaatattacgcatgttcaaaggaacactgtcatgtatattgggtgtgctgaattagttagacagaaagtttgaagatgtcatgacagtagtatgaacataagcatgtatccttattatgcatttgtgagtgacgttattaatttttactaacgaacataacagatcacagaataagtaacaccatatgtctcgatatattagattaaatacttttatctacaagtgaagattcattaggctgtgtatctcttagtgaagcagtcaacatagaacctgtcagattgggcaaaatagtagacatatgatgttttgcttttgaacaaattgggtttaatgtagtgaaaatatcacttgttattactgggtagctggtttgtgagctcacctttaatttggggtttctatccttggtgtggtgcaagaggagtgagtagatgggttgttgtacatgttgaacgtttagcatgaatcataacatcaaagtgttgttatttgtttgttgcaagagaagcaggattgtggtgagaatccttatgcattgcttgcctattcttgagatttgattattagtagtgtgtgatgtagtagttttatatttgttctatttgttgttttattttgtctttggttatactctggtattatttagggatatctcatccttcgtaacccctgtagagtattttttttctcttcatgaatgtatacgtgctcacctttcaaaaagaaaaaagaatgataataggaattaatttttgtagcatgtttagaagacgttgttgatacactcattcacatagaatggttgcaatacaattttacatacaagctttagttatttgagcttgtgtacagtttttgcctttttggcaatattgaatctcatattcttgtatgcaccttcttgtttatgacagctgcaagggcattgg

SEQ ID NO: 14565 - DNA, 2984 bp, Aquilegia coerulea
  Intron number 2 from transcript AcoGoldSmith_v1.025147m (l ocus AcoGoldSmith_v1.025147m.g) derived from phytozome v7. 0 (chr-ID scaffold_87; pos 616975 to 619958)
ttccacataaagttgttgctcgtgcaggtgttactgtaagtttgtacgaggtctcctattaccttgcattttatcaatttgcagtacataagggaatgctatttggtttgttaaattctagtctctgagtgatactctgtatatcacaagatagaagtaaatgtcttctttcgcatgtataagctagcatatacattatacaacaacggttgcaataactacgatcgacaagttataagatagtggaaaccattttgatgctttagtttcacttgggaggacacagttgcgcgttctaacattggtatctttgtttgtagtcatttaatatgatgaaagcctcgcagttctcttcatagtctctttacctttctgttagtgttttgctgaaagaatgtcatcccgaatggtatctgtcttacatttgctgttgaatgagatgtattgatcacatgctttcatgtatgcatcttatgttttattagttaggactggaggcatacgagttggtatgacctatcacctctgattgttttattatttttctcaggacatgtgttttagatatatatatatgtatacatgtcgtatgacttatattaattctagaataccgaataatatattaacatgtcttcattacttactcttataacctctacgcatttagatttctaattatgcacatagagatacataagtagatgaaacaatatattaacctagaccttacaaaaaggaaaatttaatatcataaaatcaagatattatgattagcgactggatggtatgccacttgaaaaatgaggttttgacatctgatttcaatcagctacccagaatcggagtgtcccttttacctgaaggatcagtggttcacccagaaccagatttctggtttcactcttgccttcgtaatgcccttcactaacacagaatcttcgatgtgccactattgttccattaggatacatgggctccttcatggtttgaattactttggtcatacatatcagacattaatgcttgattgatgggaaaggttttcaagatcgattttgtgtttctttagtgaaagagattatcatttgccaaaagcttgttagttcttttgttttgatggagtccccctaacccttaacataaaagtaaatacatcatgaaaagaaaaaaattattagccaaattaaacatatggcataccagtgtttaaaaaggcgtgcaaaaactcgctgtaaagctccccttatggcgttttgacccaaaaatgccttaaggcttactagtaaaagcgcggtgcacaaaaggcttatgctattggaccgccatcaacgcttttgggaaaaaactcacgctatttacactatttataaaaaaaaaacacgctatttgtgcttttgcttttaaacccttactttatgtttttcgggtatggatggtttggattgaaaggttgcaactttagaacttaagggctgattgttgaatcaaacaaaccccaaatccctaacaaaaagtccctaacaacttaagggttgattgttgattaagtttgaactttgaagaacctcaagaagtcttaattagttaattatcatgttgtgtttgattacgagtttacaacattatgtagcttttgaacctatgtttgaattctgagtttatgatattatctatcattttgtgatttgtatgaattattttgatgctatgtttttttaaatatttatttaattaaagaaaataaatgcacaaatagcttgcgccataacgccttatggcttaggcctcactttttctaaggaaaacactttagcctcacgcctcgcctttttaaacaccgtggcgtacacctttttgtaagatttactagtatgttcaaattaagatgaataccttaaagcaatgtgtaaaaaggcaagtccctgttcggataaaaagcaaaattcagaaaatatctttctagaactgtgactccccactccttaatttttcaaaaagtaatagtttctttggaagaacaatttctagaaggttaaaacgtcaacagaatgtttggcaatcatcaaccttaccatgtatgtaagcctataagttatacctgtgtgtgtttgggtgtgaaaatattcaaaccaactgtgatataaaaaactaatatgaactttcactataccaacaatttgatgcaaacaaaatgatttactctcacggataaatatcatgtaagaacagttagacaggtaaatggtaatgtatagacattgctcacatatatcgtccctcagaactttcattggatgttgcttcttattcaaaaacccatatgtgtagatatctaactcaatttagccgcttccatcgcgaacaaccatatcatctgtcacataatgaatgaccatatcatccgctagatagtgattccttgtaaggttattgatatagggcatacagcaatggcaatgtactgactacatataataatgtctatcaactattcacactagtcattgtttgagaatataagaaagtcataacattgagaaataaagatgtgttagtgtcttacaccttatgccccacttgccaatgaagaagacaacattcttgaatgatgtctaaacatttggggactgaatagtttaggtggaagcatttcgtagatcccaaggactacaacccacttttaaggcaataggacatgaaggcgattctaataagaaatactgctcagaaatttgtgaaacatatttgattcggagctgtatgcttgtggaagttgggcgaaacaaacagtttttctttggcaaggctgatcaccctgccctgagaaggaacaaaagtttcaacactccatgataacatcactatatcacttagccatgtacttttgtcaaatatatgctcaagaaggttattggttattggaaactaacaaaatcttaatgtcttttcatgtattggggaacttcaaattgttgcagaag

SEQ ID NO: 14566 - DNA, 1454 bp, Aquilegia coerulea
  Intron number 4 from transcript AcoGoldSmith_v1.019067m (l ocus AcoGoldSmith_v1.019067m.g) derived from phytozome v7. 0 (chr-ID scaffold_16; pos 954875 to 956328)
cctagatttgtcggacctcaaggtaattctgtttttggacaagttgcatatgcaatactaaggaatatcaatttctggttaagactgttaagatatttcttctcaagtcaagtgattcatatgtacttaaaaatattttgtaaggtcattgccaatgacttgagctcttgttatctttttgataggttttaatacaccaaaatcttacaaaacgaatataaaagaggacgctgtttggatagctatgctagataatataattgaacatagtttgctactagtttcgtattagtatacttgagatgcatttatgtagtggaggtccattatttgagaaactcaaaggattgatactttccccagaagagaaatttgattggatgacatgatctatggactattagagaaatttctgactcttaatgtgcaaattcaaccgttgcagctaaataaatttacactgaagaagcttttgacagccataggaagtatattgatgctagtataatgttgctttattgtaaacacttaattgtgtagcacttttttcttcgtattgatagaactaacttattttattaatacaaaccctgcaagatgtaatgttaaaaccgagaagaccagattaggggttcaagaagcaagagtcagcctttgtctcaaaagttatgcttccacaaagcatcttatgaacttctcttttgggtgcacttaaagtataaatgatggaatggccatttttaaatttagttattgaattttggattttgtaactgcactgtgtagttacctcctataaaaaaagccataccctcataaattctcagtaattgaaagtagagtctgtttcatccttttatcagcttttactttagcatgactgcaataccatctcgtaggtcctactaattaagttgaccaacacatctgctctcacctgtgtattgtgtaaacagtaaccaatagttaagaattttcactcataggacaatcaaaagaatctatatggtaagtgcaatgcaaggatgttccattgaagtttgaagtgcctcacatgcccttttgtcctgtttcttgcattgtcaacttgcctcacaatctccttttctgcctcttatatatgtgcttttcatttaaagtatatcagcacacaagatgaagtttcgctactgggtagatattttgtggcttcatttttatattataatattatttagtcacacgatactggatgcaacctaactgtgcttgggtttgcttttctaatattttattcacatgaacaaagtgaggtgcaacttgaagtggtgcttgggtctgtcttacatgattgcaatcttatctatcaaattagggaaatgaagaatctattgtctttaatgagttatctagattgaaatcattacttttgtttctcaggcatcaaataattgcattacaaacttgccagaaga

SEQ ID NO: 14567 - DNA, 2248 bp, Aquilegia coerulea
  Intron number 3 from transcript AcoGoldSmith_v1.006607m (l ocus AcoGoldSmith_v1.006607m.g) derived from phytozome v7. 0 (chr-ID scaffold_1; pos 7929531 to 7931778)
ggtacaactgctttggcagcacttgttattgggaggtaagggatttatttattttttccaattgattcagcatactattttatcaatgtgaattcttgttgtacgtaattctttgctgtttagacttcataatccttataatgttaccaaactctcagtttgcatgatctggtttaaactagtgtttgtcctagagcactaggatctcttttagagtgcacttagcacccaccctgttaacaaaagtgatctagattcaacagttatgctcgagtctttacgtcaaaatgcgttgggccattggttgattgacaaacatgattatgtttataatggtgcctacaccaattttaaagctaaaccctagttagagccaacataatacacaaaaactaccctatatgatctaccaaactcgattcagatttactctgcgtgtactttaattgtgtgattcagcctaaaaggtgattggcatgttctattggttttgctgaaatgttatccattgtacgagtcagttgggtgggaaaagttgaaaactctgctgacttagcatgtttgaatgattttgatcagttttcgttgcctggtgtcagttgggtgtcttgaccttttcttgattttgcggttgaaattgttttggttcctggtgcaatttagtaccattgcttcacagtggttttgtttcattctgacgaactcttgatgtagggtattttaggttcggtcttattagggattagttttggagtcagtttgggtatcatcatgtatgtaaccgtgttaatccatcaatcaatgcatttccaaagaataacatgacttcaataaaatctaatataaaatatttgaattatgtatagactatattattttatttaagtaatggatcctttattcaaaaaaaaaaaagaaaaatatttgaataccattatcacaattcacaagtattgagaaagagtaaagtccacatgaaaagttgaacttttgatggtatcacaagtattgaggatccagtacagttacgagtctaaaccctgcttcactgctcaacagcaaacccattttagcctttacttacatggtgatggagcagccgaccctgtcatgtctttttcaaagtccaattcatacataactccaggtacttcagcctgaatttcgatgttgcacttgttggcgacaagcacttcatgaagtacctattttctttgacattcagacagcttgttgggtgttggaagtgattgttggtagtgcaacataaattgagaggccatgactttgtataaaatatagatacctcccgtcaagcttatggagcataattggtagtggacttgtcacctccaccctttgggataaggggaatataagcgatgttgtttctgtggcttagaagtcagtcccctggaatggttgaccacatccataagctctcctttgccaaatgccaatagctttaataatctggtctcagggacttgtcttcaatgagctctttcaatccccttggaaatgtttttttatctaagttatatctatccacttgctttcatcttcagtaatggtctaaaatgtagatcatccactattggcctccagcaatccttctctgtatacatttccaaattaaaatcttgaatatgatcattggtaatttttataatcttggtcttatttcttatccatttagcaatctgtcgaatcttgatccccgtctacttctttttggcggcgacaaccttttgcagtttttctccctctttgcttcatctaattcctgctttttgtatccattgaatctcctcttgcgcatttcttgaagatcactttgcagctcaattttctgatttatttcttcattcaaaaacggattcccaaatgaaattgtggaaaacttatttttatcttaccttaaatttgagtgtatcatgccatattagtctttgtttacagatgcacttgtgaattgataaacagttgaatttccctttcttgactactgaaacttgtatatttgtatgtatgctaaaattgattctggtttatttctaggtcagttgaatattccttctctaatcattgattgcatgttagctaaacttgattaagtttaaagcaaactgaaacatttattagtagtcgctgtactctttgaggtttacttcccgacattatgattcattaggtctaactcgtaactttcgtctttacttggttgacagttcattggtggtggcaa

SEQ ID NO: 14568 - DNA, 2341 bp, Aquilegia coerulea
  Intron number 1 from transcript AcoGoldSmith_v1.002435m (l ocus AcoGoldSmith_v1.002435m.g) derived from phytozome v7. 0 (chr-ID scaffold_26; pos 1409543 to 1411883 reverse stra nd)
caatactgaagaatctagtatcggattaagaaacggtttgttctttttttttctttttgatatgaactgaaatcttaatttttgttggaattttcactttgggtatttgtttttttgaggttttagacttgggctttcggttaatttgtaattggttttcaattttttgtgaaaaattgatgtttgggtattcatgtttttgggtgtttaggtttgggttttggttaatttgaattggggttgtgtagttttattattttgatatgtttagagatagattttagggatttcgacttttttttttaatcagattttcttttcaaaattgggggttttgttaattgggtttgatttctaagaatgcaagtttgtgaggtcccccgattttttaccggtgatggggatacctcaacagagttccttgtctgtaaggtgaaatgaaagggatatattgacttgaccaaattttgatgtatagttgtaggtctatatatgttttacatgagttaggagcacataatgatttctaacagtgtgtatttgcattgcacgaagctttgattggggtagtacaaaatgatcaaaggaataagagcttatatagaagcatcaacaactgttatcagtcatatctgttattgtatttcaaaatgcgctaaatctctaatagcactgacatgtttatagtttcctttgtcaagtcaaggttggacacaagtctcctataccaaatgacaattcaataaagcaatcttaacatcaatgagaatgtattgacacttcaaatcgaaaggtgtggtccgtcacagtgtcactttcgaattgcttagctaggatgggcagggcccagaccatgcgccttagctgaacattagatgttggtaacccaactttgcttaggaaatgagacatttgcatggagtgcgtaggatgaggactttgtgaaagtttggagaacactgtcagctcgcttgataatcaataccttttgggtggtcagtagctgctaggttgtcgtccaaggacacaattatactgtttagtttgtggcacaaactttgtctgtaaatgtgcaggcttagacttttatgcatgtgttgagcacttcgttatccaagtggaggcaagaggttagattagagttatgatatgtgggtgggtggggtgggggtggagaagagagttataagctgagaaaatgttcgtgggaggttcatcctttgcaagccttcatgtttttaataaggaaaggaaccccgccgaagggttttatttggattgatccacatttaatggtcagagctatttaaaggactgatcttgcatttttaacattgttagttaacacgttggttgcctagcgagacctcttacatatgaaacatattaggcatgtcttcgggcatgttaacgagtgattgtacattgtagcatgagatgaatgctacttagttgcatattactgcggggacaagattttgattagtcgctagctttgtttacagcgccagttaaattcttgtctatgtactttgatcatctgctatatggagttgacaaagtgcgttacacatcactatcacatgcttttgtcttatgaccttttgcattactaaatgccatgtcaatcttatcctgtattctttgacaaggagaggagcgagttaggttgaagattattattatggatcggttgaggctaatttttttatttatttttttgactttgttatacgcatttagttgaaggctgtgttgcatgggtacaccagtgttggtaccgattcccaaatccatcagtctagacattgattcagagtgtcagactcgattgcgccttggattttaataagttttatatacataaattaaattagtaaaaaagtcagccgagtctcatttcttatagttgccatgtcgaacactattgcacaacacatgcacccatacccatgcaatacatgtgaatgggatgtagagattagggatgtctcctttaggctgaccataataatataccttgatgcaggtgctagaagtgagtgttttatcatgcttgttttgatgttgtcaattcaggatttataggtggtgaagcactatttgttgagaatccttgtaataacacccatgataaaaaatagagatagtatgattcttgaaattttgtttgtgagctgtgactatgcccgtacattatcaaggacatagctccttaaattttgtttctttgtgtggtattttacattatgtgatagtatcttttgttggatctgattacttgtaaacttgtgattgtattgcagtaagatcatttggaacggaaggccggaaaaaagat

SEQ ID NO: 14569 - DNA, 517 bp, Aquilegia coerulea
  Intron number 3 from transcript AcoGoldSmith_v1.004338m (l ocus AcoGoldSmith_v1.004338m.g) derived from phytozome v7. 0 (chr-ID scaffold_5; pos 1906923 to 1907439)
tcatacaggtacacttggatctcggatcttttttattgaactgcttaaacaatctagctattaattatggcattaattttgttgttttgaagctctactagtaactaaggttcacctgaaaaaatgcattgcttatttcatttctcattttgctttatatgatcattctctttcataactaccatccttagttttcgttttcttttcataatttgtttggtttggcattttcaaatcgtctgtttgtatgtgatcattctctttcataactaccaaagtttttgtttataccaagatttattgatttaaattagcaatcaacttttcacgtcaccatctaaaccatatcccatggaccaagattctgaggttcttcatcttgccggacaaacaaattgttctttattttgaagagtttgttgatgatagcattgtttttcaatctgcaaatagagatatttatccgcttcctgatattttactgtattatttgttcgtcatcagagtggggttcacc

SEQ ID NO: 14570 - DNA, 1384 bp, Aquilegia coerulea
  Intron number 7 from transcript AcoGoldSmith_v1.005511m (l ocus AcoGoldSmith_v1.005511m.g) derived from phytozome v7. 0 (chr-ID scaffold_21; pos 3787708 to 3789091 reverse stra nd)
ctgcaggtgcagtattagtacaggtacatggctttaagttattttcttaccataagctcaatattcataaattgctggatttcctcagtaacacattgttttctgatattttgttttttatgtgactggttataaatctggtgaaccttacatattctaggcattacagagctgattgggtttaatgtgtaatccctacgagtttttttttctttttttcttcctcacttgccatatcagaattttctataaatctggagaaaaaaaaggttttcctgtgagcctagtttcttggcatctccacttctccatacatgtgaattgcattagcttgctccccttctgagtcagtcagataatcgtttgggagaatgttgtatgaatcaatgggaaaacatttatatgcaacttcgtttttcgaacaacaattttatttaatttgatgatatataactccttgcacagcgatggtcatatattttattaaacccagaaagttattatgaaatttcgttaagtaaagaaaaatatatttgatatgatctataagactataacccttaaacaggcaatgtgtatattttatttgcaacccgtcctatgtcatcccatcattaaggttgaggagatgcttggctcttcgtaccgaccccacatacatctttactcttcattcctcatcattcacaagttaatacgatatgtcttgtaagtattggtatgatatggttaataaaatacctcttgtcatcattaaattggcggttttcaatagatcatcaaaaagattattgtatggtttgagaaatagcatcttatacaaattattctctctattaacagaaaaccattatgcatttcaacagaaggttgaaataatgaagttggaaacatcttatataaattatattctgtattcaaacgtggttaaattttgctatatcaaataatagagaaaagtagaaaacccacataattgcaggaagccagagatcgtttatgagtgcctccctacatacattagtaaattgatctgacaaatatggttttcccaaaaatgcccccaatgaaatccacagaattctctgcaccctgtctagattggtcatggaccttgcagacactaaacatgcatagatcataccatattccataatgaatgtgtttcctcttatataattattttcgtaggtggaacaaaaaatgcaataatgcaagaatgaaatttatagataattaatctttacaaatcaggtctaaatgatcttcacttagaaagctgtttggtacattttttctgcttgcttcttgcagaaattggattttcctccttccagatttgttctttaattaaactcaccaagtcttgttttgcaggcttgtg

SEQ ID NO: 14571 - DNA, 3079 bp, Aquilegia coerulea
  Intron number 1 from transcript AcoGoldSmith_v1.003478m (l ocus AcoGoldSmith_v1.003478m.g) derived from phytozome v7. 0 (chr-ID scaffold_44; pos 177654 to 180732 reverse strand )
taatacacttgcttcaagcccttttcttgttccaagtaagttttttttttattgttagaatgagtttcaattgagattttaagaatgcccatctcataatttgcttgtatgtagtgcttttgcttgtcaagattggatttttttttacttactttgtgtgtagaatgccaattttgaaattaaatttcgataatgaggaatatcattttcttctatagttagttttcaaaatgtcattttcttagagaatttttttttagtgatattatctaagtattcttctctatcttaatttattgttgaaactttattgcaaattgtaaatttgaattgttgagtacttgagtcttggtttgaaatagttgaagtttctaatatctatcttagaatgaagattttgagtgtctaatggtatgttcggataacaaatgtatgccaagatatgattcggctcattatacctttgtttgcctcaacatgattccttaacctggtatgtatatatgagaaaattttatattttcattataattcgatttattggcctaaggacggatttaagcaatgtctaatgcaacttatttttataggttagcggttgctattaagatgtatcgacataacagttagtttaagtttgttgatggatatatttactgtcaagtgctatttgtagaataagtacccaacccccatctttctgttgatgccccaatttaatggatattacgcctcattttactgtctgtcacaatatgttcataataaaagtctttctcgtaggaattatcgaaacagataaaggaagcaaattattattaatttgaaggagatacacggtcattgagttgagcagcctactaaatactctagaatactcattttaccctagccaatgtgggtgtattgcattagacttttttgtactaccttttgttgtgcattgtgaatgggaacattactaaacttataacaaaacttcttgatgcatatagcttacatgtttatcataatctgtttattgtgctggtaaataacccaataaatgttacaaaacgcttgatcggcattgaagggaaaggaatgcattgcaagttttgaaagatctttcacttcacatggatcaggaggatttagggacattgagaaagtaacattagatatgtttttaggattatagaacttactattcaaactataacaatatcctaaaataaaccatcacgagattgtttgatacacatgaggttgttgagtaatgagaatgatccgtttgggctttgaagcgctgaaatatttttggctgccataacatacggttagcaaagactaagacttttagactgaagagtggctaagaaaatcaattgagtttgtagtgtttttgtacatatatgaagtgatgcatgggttgctaagcagcttttgtcagccgttgtatctaaatactatataattgagtgttagaaccctacttgagatgtaaagacagtgtgtaggaatgggcatatagtcagcatcgaaagttatattggaatgagatataataaacatatgcccatgctatgcattgctcagtaattctttcgtctaattgtccagtccactgagatctttcttcgtgttatatgggatgccaccatttttcattcagccaaattatctctaatatgtagttacgtcttacttcccacgcacgctaagctgcaccattactgcccatttgtcctatattttcatctaccaatttccacattaaatgactggaaatatcagttttttttgcccatatatgaagttcacagaattcactatcagcaggagcggctcacatttttctgatttactcatttatttctcctatttttttggtgtttttattaaaacaaaactctttgaaggtatttgtattttagaaatcaaagaatttttagggtcaccttatttttgactttttgaagaattttatttagtcagttataatttcttctactgtaaacctaaacaaaattaaattacatcaaaaatagaaaaaataccactatcccctaggttttttttttgaattttttttctaatttgaatctcaagaaaatgccccaatcttgatttgcctaaggccatcaattctcttgagccgtccctgactatcagtgaaaaggtcatagtgagaccattctaacgagatcaatagcgcataatcttaatgcatatataaaagaattcactactaccttttattcatgcattaatgtaaataagtaatacaatttgctgtcactggaaaggtcttgcttgccttcaagcatgcgctagacacacccaccagcacacacttgcagcacatttatttaagcgtggtatggttgtattgcttgcttcacttatatcaatgaatttctctaactatttatcaaaaaataactagaaattcacagtagtactttactttagggagactgacttgatccaccttttttgttgtctacttgtctactgtgttgtagaatatctcatcattttggtaaaaagttgaggaacaaatgtcattcactgtgttgtggagaagctcaaaactgaaaacctagtagtaaatgtctaccatttaatggttggctattttaggttgaccaactaaatgtcttatatttcgactgagtatttaacaagaagtcactgtgttgtggagaagctcaaaaggataatttgaattgtaaaagctagtgaatctctagcatttaatgactggttattttaggttgaccaattcaatgtcttatgtttccattcatcttcaatagtatagtagtatttaacaagaattctactaaagggcatgactgtcgctcacaaagaagtacatgtgaagtacacttagtttcttgtcaaacttatcagggtttgattgtgctttggtttttagtaagtttgcttcataaactctgtagttttacattgttccaaattcaaagttagaatcatttttaataagcaatacggagtacatgtctttatttatgcgttgaaatatattttctaataacaattttaaatggcagcactacctcctattcgaaat

SEQ ID NO: 14572 - DNA, 776 bp, Aquilegia coerulea
  Intron number 1 from transcript AcoGoldSmith_v1.009698m (l ocus AcoGoldSmith_v1.009698m.g) derived from phytozome v7. 0 (chr-ID scaffold_2; pos 5553984 to 5554759 reverse stran d)
atcacttaggtatctctctcaaatctcaatctcaatgtcaactaacagctctctctctctcacacacacacagtctcacacacacacatcgcttgtgtaattgcaaaaaatagatagttaaattcggtttgtttttttttgttaattttggctccaaatttgtggttttaattgtaattgatgattgttgggggatgaacttaagctgcagatcaaatgtaatttcaaattctacttttgtctttagaaattttgtgataattagttatgttttaccatgctttcatcaacattatgttcttcttcatcatgttgatttgagtgtttttaattcctcagaatatactgtgatgttctgtccaaatgtttcatgcttaggtatatatatattgctgaagaagatgacaatttcatatattcattctttttgtaaggtttagttaatgaaaactgtttttaatttttagtagtatattttggactaagacttttgaatcataaaaatgttttgtaaagcttggtctgaagtctgaacaataataatttaggttttttaattagtagtataatatatattctttattttttatgatacatcgatttcaattgaaatatattctgtgtagtatgataacatgttggctgttaagaaattttaaatggtaccaaactattattatgtctacaaattaaatggtacaaggtattttccagttgtgatcagtagcttttttattgcaggttcttcctgtggatattgaagaactttatctgac

SEQ ID NO: 14573 - DNA, 1413 bp, Aquilegia coerulea
  Intron number 4 from transcript AcoGoldSmith_v1.011905m (l ocus AcoGoldSmith_v1.011905m.g) derived from phytozome v7. 0 (chr-ID scaffold_33; pos 487045 to 488457)
aagatcaccaagctggcgttaaggttgttcaccaagtaagtgatatattatttacatttcagcttttcagattttgagatagtcatggcaatgttgtcgaccatattgatatctcaccttggaactcattcacacaattgtattaccatgtaatggtggaagttctgaagaagccgaaaatgctattagtgctggtgtagatgaaaccattgtccaaggacaacaacgagtgtcggtgaaaccatcgtccaaagaactctattggaagagatggatcttgttcttcaaaaccgtcccttccccaaggtttttacctactcacatcaattcaacatctgcaatttttcttttgcaaattcctagacattacgccttatgatttgaaacatatcactttgcttgaacaactgaaaatattgtactgtcctatattggcgaaacgttttggacaaggagaaatctcaagctctagtccacaagtttacaacatctccataggtacaccattcacaaacctcttcctttctcttaacaaattgcattgcaaatattatttcaaattaacacctcaaaccttgcttcgatttccatttacctttttttgtttccttgtaatttcatattgggatgatatttccttatctagcatatatttttttcatgtttggcctgtttatacttcgtttgttgctaaactaggattatattttcttccgttaaattgctaataagtctgccaaaatttcacctgtatgcaaatattaattatgtagccataacaagcccaatctattctatcatgcagcagacatcagtctgccttggaagcggacagaaaagggtgaatctttatgaaccatctcatctacagagggacgacctgatgtacaagttgttgcttagttgtttaatttatttgtttggtttcaattactctttaactaaaacaagttacaatttgataagatctttttgtccattcttagtcaataaacccaactaccaccccccatcaacagttcatgttctgtactccattctggattgaaaggcatgcgcatgcttcatgggcatgttatttcaatttaagtaaaattccaaggattcggtccttacaagttgaagctgacagtggtcctttctgattgataattttgttctgccaatggatcttgtgttcttgttttgctggtttatatatttttgggttgtttatcaaaaattatatactctcagatgaaattgctaatttcaaagaactttgataatgataagataaaagtcgaccaaaatttcatgatcttcaacagatgaatcaaaagttggaagcgatacaaatgcaaagaatcttatgaataatgtgctgttggcattgaaggtttccaagcatccagatctgatcaatcagcatca

SEQ ID NO: 14574 - DNA, 3306 bp, Aquilegia coerulea
  Intron number 3 from transcript AcoGoldSmith_v1.004206m (l ocus AcoGoldSmith_v1.004206m.g) derived from phytozome v7. 0 (chr-ID scaffold_26; pos 1902650 to 1905955 reverse stra nd)
aacgcgtaaaggtatttttcttcgttcagcctcgatagatagtatgtggtctgaacaaatatgtttgattgtagcaattactagcctgtacacgttggaaaacatgaacccttttaaaatctatttaatatattcacgctgtctgctcatgaattgaattgttgcatggcattgagacgaagctagtgcgtgggagattaaaatcaacatgaaaagcaagctttatggtcactactctttacttgtttgtagatcagaagatgtaggaaaacatgatccctttgaaagactattttagaactatttgtgctatgtatgttcatcaatttatctgttgcatcgctttgagctctttacataccatttgtaggatatagaaaccagtatgggaagcaagctgtttgtctttactttcttcaggctccacaatggttgaattatatccccattgagtaccagtttcctgtctaattaggtattatgcaatttaaaggattaaaccaatagctgccctattgtgagaaacctcaggaagtccagtaaaagaccacacttatgaatacatggttaatgcgtcaagaaatcgtaatctttgatacttcagtttgaccagaggttgtggtatggtcagaaattgagtgagctgccgtagaggcggtgactggcaactgtttgtaacatgttcattttgttcctctatttacctccaggagctcgccacagatggctagagatgtgaaaatttctttgtccagatatggtgaggaacatcaacaaatattcactcttgtaatgagtcgattgatctccgacagtctcaaggatggagagcctccaactataggcatgaacctgctttcatctatcaaagagatggttggacacagccaaggtgataagtcattcatattggtttgcaaagaatcccactagctgcacagggaagttatgcattagggctagaaatttcttcagtactggttccatagtcacttaatcaggcacttaggtcctatcacgaggcaacggatcctcttaaattttaattagttttcatcaatttgaagactggttatcttaaaggaactttataagctctttgtaaactccttcggtaattttcagtatcttagggagttcttttgtatatcccacctgtggtataatgcccttttctccagtttttatcttcacctatccaattactggactaacaaacattaagcctatgtaacaccagaacaatttatcctagggttagtcaaagctgatagaccatgctctgccacttaaaattaatataatgtggttgtgagctcagtgatatgacttgcgtatttgcgtgatctttgccatttggacctagattttgaatagaccagcaacagctagaacctagaggtataactgtgctacatgtgtgacttaggtagatgcatataatgaactgacattggcctagaattgcatagagtgtcttgcaattttttgtgcactgttctacatagaagatttatcaagtctggtcaaagagagttcttctgtttatggtttgccctgatcatagctattaaagcaatgcctgaagtgcatttttaccaaaaagaagcaaggtctctttttttggttcctttaaaatgaaaattcgaaagaatcgtgccaaacgatcatttttacgcaaacaacataggttatacgcaatgacttgtgtgcactttatggttatttacttatttttgtatcttttttatgatcttatacattctatttttacactattattctaatgatctttgatcaataaaagataactgggttaaaatctccaaatgtgtcgtcatgagtaagttttagtcatatctccttggaagactcattgtcttttgcagcttagacttgatttgataatctttatctttctttcttcctgagtgtggtatgccaggtctcatcattttagaagtaaggttagcacttgaaatgctagggagtttcctttgtcgtccgtgtcttctatttttttcccaggttccccttcatgccctaacttgccttagcctaaagcctaacgactaccataaacaaagcagcaaaaaaccagtatatttaatctgggatgtagggaagactccccaataggtagctttttatatgatcgcttgtttattgaagaaacatgattgtggcttctgtccaaacaaattcagcagagcaagtcaaatcctttgactggttcggttttcaactcttgcgctctagttagtatgtcgtggatatgattaaccattaaccactcggctcttgccttagttggatgtatgagaagtgatgctatgctactcggtgctagtttattgaagaacatgattgtggcttctgtccaaacaaattcagcagagcaagtcaaatcctttaactggttcggttttcaactcttgcgctctagttagtatgtcatgtggatatgattaaccactccctttcctatccttcaagctcataaggcaggctgctcctttcctattgctgttcctctggagtagtaggactagcagctcttgccttagttggatgtatgagaagtgatgctatgctactatgtttaatattagtatgtcctcgggagttttggaccattcttacgtttaggagtaaaacacattcagttgtgagttattaggcaatatttatgccaaagttggagtaaattttcggtgagtagttgaaactggttaattgatcaaactgggtaaaatctccatctgtttaaaattctcaaagtggaatttatggagatatcatgattgcctgtgctaagcgcgtaggcgtgggactcacctctggcacctaaggtttatccttagtacgttggttgacatagtaggtttggttgtttggtaagcaattttaattttcatagaacttttatgttttgttataagtttaaatgtagttgtaacggattagctgatttgggattgttatatagtaaagcatatatggttttaagactatgcatttcacacggggagctagtttttgaattgataggctatattataaccattctgagttcgggattgtatagtcttattgatattagttttgtgtgccatcccatttataaatgtttcccaaccgtattggtctttttcattgttcatcttggcaaatttggatatatatatatatatatatatttgatatttctaagaaaatttttttgttgaacttagttttctttatcataatttttttactcctttaaactaatatatagttggtttctctcgaagggtggtgggc

SEQ ID NO: 14575 - DNA, 2318 bp, Aquilegia coerulea
  Intron number 6 from transcript AcoGoldSmith_v1.001103m (l ocus AcoGoldSmith_v1.001103m.g) derived from phytozome v7. 0 (chr-ID scaffold_18; pos 3097171 to 3099488)
aaggttactgattgtgagtattgattcttaatgttcaggctattaaattatatattttttcgcttcatcttctcatggtgacatcattgcttttttcactgaagatattatatgttattttaaggtgactgggtcttataatttgttgatatccaaccccgtgatagaaccacaaaactttcacccatgggctcatgtcaccctcacacatattatccattggagagttacatggtatattgtgcatgtttaaaacctaagctaatcggaatagtacgtgcatgggtaggcctaataatcaactattaatccatgaaacaaggatgataatttcaggggaaaaaaatgcttgacactgtatcaaggatgaagaagcaatggacaatccgagaaatgaagataccctacataccctaggtttcagggatttagcctttcctaggtcggattttctgttataaatatattctttgatagactattagaaatgaaagtccattgatgagtgtaacactcactattgtcggaaatcactatctgttgatttttagagataagtagtggaggtgaagtaggagaaagtcagaaaactcctagtcactactattaggtctctgtacctgaacgaggacctagttgattctagtatgttgtcaagattgattctggacataaccaggcaaggttaatgaacattggatacccatgaatcttaacccataggtaattaagtatttaccttcaccaaattaacgtgcagatataaagcccagaattaggctgcactgacacacattttgttccataggtcatcatagtctttatcaggcttaggccctataagctacctgttttcctacactgatttattgaggtccacacaacatcttttggtattacgccacctttttaagaattttaaagctgctaatggagaaagaattctatattgggaatttgggatagtgtttggatgcagtgattggtctcaaaggagtattgatttcaattacaacattttcactaagaagcactctacgataaagtaccatgtggagcagctcattttctgacatttttttcaatgatgggatatttccataaatgtgtcgagatgattttgaatggccaagtaagcttggggtcaggaaatgatgactggctgttcgctgaaatcttactttgatattcttgaaaagtgaatgttagtggaggggacttgtgcaccctatattgtcatggaggaagttatgttgaagaaatacctgctcaaagtattatgtggaccttatgatttcagaagaacccctaacctctccattctttatgtggcatgccaaagaagtggaaatgctacaatctttcatgtgaaccccattgttgttttgatcatctgttggtgacttggtgaggaattaaatttcgtttttggttaattgtatggatggattcaacaatataggtaaaaagaattgttgctgagcttggtcagctttcccttctaccttgtgatttgattttatgggtacatttttctttgggttagtaatttgtagttccttgttgctgatagtctaagcaattacttacagtgatactaaatatcatcataggcagataataacagccaaattaccaattaaaaccccaagataaactgttctcctgagaaaactttccatcgaaaaattgaaaaaactttccatcgaaaaattgaaagataggaaggaacaaagagcatagattgaaggaaaacttcactctagcagtgtaaaattcccagagataaaacagagcaaacaaggaccagtacagaatgtgaagcctagatagaacttaggagctcaggcgctcagcactttgattccactgaaggaccaggttctgaaacttgtagtccttcctttctttcaggtcagctatttagtaccaaattaccaatgaattccaagagaaactcaaagaggattcaaatttcatacccaaaaagttgaatccaccaacaagacagattttatatcccaacaaaaaaagtgttaaatatcattgtcatggcttcagataatcagatcagaagaaaaaaataggagctgaaagatgataagaatattacacaatgagcccacactattttacaaaaatgacgatcacctaagtagttagggagttgaattttcatgctgtttcttgatgcccttgaatccttgattgcacttctcttcagatgcctttttcatattattaatttatcagtgagataagcatctgctgtttctgatctctatgtactctttcagtgcctcttctcttggtggggt

SEQ ID NO: 14576 - DNA, 1534 bp, Aquilegia coerulea
  Intron number 5 from transcript AcoGoldSmith_v1.021454m (l ocus AcoGoldSmith_v1.021454m.g) derived from phytozome v7. 0 (chr-ID scaffold_18; pos 2774402 to 2775935)
aagggaagggatttattaataacagaggctcccaggtaccttaaaaaccttctgtattcctatagtttatgctagtgtattttctttctagttcttgtctttgatgttcgaggtgcactcgcattcaaatgcatccatgctgtatggcgcatggggatgagctgttttttccttttggatctgagttgttatttgtttctagtagcttgatatatagtgatatggaggaatactatcttgtaaatatatcaattagcttgtgttccaacattgggaattttttcgtggagcgttgagcaataaatacctgttacgaaatctgttgatctcgatctctatctctatagaatattctttctttcctagcatcaacagttgatatgtatatgacaatgacaaaaattcatgtgtaaatgtccaaaccatgcattcgtatgttcaagacatgacttttataaatctggaaatcctaccaacgtgttgtggcctgtgtttgaatcacaaatgctaagaatgggttgtcgttttgaagctggacaaaacttttttaatgggtcaaagaagtttacaacagctaaagatggtgctgtgaggatctgagggagagcctcactagaccagaataaaatacaaaaaaacgattaccgaaaacaagaaactaaaagtgaatcaagctccccctaactccccctagtttgctataaatccttaaaagtgatgatcctttttgactgtttcttctaacaaccaagaccaaaagtgggacctaacaggagttaccacgtcgtcctcaattattttcttctttacattagagcattcctttctttccaaatagtccatgatacttctgcaggcaggagctcccatatgcctgttcccaagggtgtatgtgcatgtttaggctggcatttaagcgtacttgataacaggttttcattgatacatatgatatatcggtatatctactcccatgtgcttacgtgtgggctgatattggtagcaaagcttgcttagatacacataggggttgagatttacataatacatacttatgttgatatgtaaatttttcggaagaatctatggaaattaccataaactgactgatgttttagataacctttagaatatctggaataatagaagtcaaaataaatcacatactgtacctgaaatataacttaagttgaattcacaataacataataagggtggcctctttggttggaaagttaacgatagactggttggtattatatttcgcatctgaactttaatggtggaacaaagggttgtttgacattatctgttatgtctaagaaagagatcattctctgattgaaaggtctaaattaatcacattattttgcttcttttggtggtggggacagatatggagcatcaggtttttcctgtatgccatctctctgtgttttttttttttttttttgctttttctttgtatactatgtaagtggtatctgaattatctgttctcttttcattaacctattcttctcttacctttcag

SEQ ID NO: 14577 - DNA, 1111 bp, Aquilegia coerulea
  Intron number 1 from transcript AcoGoldSmith_v1.004226m (l ocus AcoGoldSmith_v1.004226m.g) derived from phytozome v7. 0 (chr-ID scaffold_37; pos 1898279 to 1899389 reverse stra nd)
cgctccaaactacgacaggtgtgaatatttatattaagcttcttttttctttttttcttttttttccttttttttcaaataaaacaaattttattgataagctcaacgaattacacaaattaaagtagaggacaaacgcgctacaaactgcgtggcaagttctttttttcttttttttttgattggcaagcctgttttaacgggtcataatattaatttggtttctaactcggaagtagaaatatatcccatagtagctatgctctcaccatttatcgttttgtaaaagatttcactgtttcatgggaacacggttcacgaataaatgtctaaagaaagaatggtagcggggactttaaacttgtttgcagaatctaggaattggcatcatagctatatgggttttgtagattctagttgctgtttttaggtaattttcaaatgttcctgatataatccttaattttgtagaatagctgtcaaatgagagttgaaagatggttctgcaaattaataggatatgaattttgtttttgaacatatgtgtctgtgattgattgttggattttctcaggagtacagcttttttagcaatactttcttgtaaattgaacttacaaggttaaatgtgattgagtagggaatattggtggaagatctacaattttaaaattcagactcgttttaaatttatattctagagtacaaacaagctaacaatcaattaagcacattcttctacttttaagtagcctattttcacttgtgatgatgagtgtttatttatgcagatggtcaatgagtaaactctaggttcttgtaattaaatctgcaatctccaacggttgattttcagttcaaagttttttcccccctcttctgttaaagtaattttattatgcaaaattatacttcttgttctgattcagtacggtcatccagtgacaggagaatccatcaatgcattctaagttcattaggacttgggcttaagatactagtactaaatgagctttgtaattttactattactttaattaaaattgatagttttgttatttattatcattttcagcactcagctctccaggtattgattcaattgtgcgag

SEQ ID NO: 14578 - DNA, 1102 bp, Aquilegia coerulea
  Intron number 6 from transcript AcoGoldSmith_v1.008330m (l ocus AcoGoldSmith_v1.008330m.g) derived from phytozome v7. 0 (chr-ID scaffold_56; pos 959607 to 960708 reverse strand )
ctagcagctagtacccttggcgtagaaccctcaaggtaactattgacagtgagattacttggattataacattttacaacaatagttgtaaattttgtatttcttacatatccgcatcaaagtgtaattaactcgataactcataactcattcataaagtcaaaagaaacaacaaatgaactcttcgaactagttccgttagaataaaagcaataagaacatggttttgttctcggatttgggattttgctgatatgtgatacaacgtaaggtaagtactggacaagtgctacaaaataggttttccaactgttggttcgaaatatttcttctaaatcatgttctagtatccagaataaaccactataaaggatttggcccatttgtgtcatattataaagatttattaaaaatgaatctattaaagatttatgagtggtctatcgcctatgcgaggatgaagggtcatcaaacgaggaagtacttataataagtgtttgtccgtattcatgtgtttttatcttcttcattattcacaattgatgactagttcgttagcacattctatggtttgagttacttctgtttttaaaacaagtgtgctctccactgataatgcaatggggttggcaattataagatcccagaggactatagtcagatactcagatcacagagacatactgtgtgaagttggtggtcgattttactttactttcaagaatttaggggccgttcggcaacaactacggaatgcatttctttccttcttaaaagtcaagaagtagaaagcttgttcgggaatttaagaaatagaatttagaaagtaattcctataagctaagaaaggaattttataagaagtttctagttttagcttattacttctgcctttctcctttccaacaaatgaacttatgtagaaattccttccctattttgcgttggttgccgaacagccccttagtcatgttgatgttaaaccagtcctgttgtattcttacaacttttaagaatctctcctattccttgttattttagaagctaacatagttgattttgtacagttgtgtggttgtagaggatagtgccataggtcttg

SEQ ID NO: 14579 - DNA, 1732 bp, Aquilegia coerulea
  Intron number 6 from transcript AcoGoldSmith_v1.001295m (l ocus AcoGoldSmith_v1.001295m.g) derived from phytozome v7. 0 (chr-ID scaffold_5; pos 3020378 to 3022109)
atacattggctcaaaacgaggacccaaaatttcaggtacatcaatggttcatacttctataatttaaaattatcatatagcattattttatcacccctgactatggagggaagagaaggagtgcaaattcggagagtgaggtgctcaaagaagtataaaaaaatggagaaaacaatgaaaagaaaagttaaaaacgagaacgaatgaggtttgtatacttgtttattatttgcagaagaaaatagaagagaagaagaaaagaagaatcatgcacacagggacggagccagaaattatttttgagtggggcactcgaagaagtggggatttttttttctacacgtagtttaacaaattaataaaaaatacaaacttttttaactagtaatgcaacattttaatatttaacaaataagcttatactccacatcttcacaaaaaataaataagcaaagattttgacatttacttaaaagtttcacaagatcccaaatatatttaccaaaacaaatcttcaaaatacatttcaatcgcaattatatatctataattttgtctttgtatcttgagattgtgaaattggggaaaggatccaagaaacaattttttgagaattgagatggagtaaccagttgtttaattgttaagtttgggtgggatggtatgaaactaaaacctactgttttttaagaaaaggaagaagatagaaagagagtatttgatttcactttgatccaattaggcaacagtctaattgactgtgcaaagcccaactctagtgaatcagtggggcactaatgatctgcttatagtaggccatgagtaacatataaatctactaatttatttttccaaaattcactggggcacgtgccccattatgtgccaacatagctccgtccttgcatgcacatatggatcaggatattcagacttgtgaaaaatttaatcatacgtctcattgtttggtttacataaagagttagaatgtgctgaagttttgtggatgatttgaaattttatggagatgatcatcaaattttatagataatttccacaatataactagcctccatagttttgacccatatatataatcttcaagttggtcgtgaaaatggatggtctatgattcttcaacttttgaactagtggttatactctcatcagcaaagaaataaacttataatgaggtctagggattattacttgcactcatatgcgtaatctccactggaaaaaggtcattctgagacttttatactggctggatgaagagaggtagcgtgtattatcttgaacctacataaataattcttaatccatcaagttttcaacaatgaataccgagagtggaaacttaaaacatcctaaagcgactatcaaactttatggattcttaataatcaatgtaatcaataaaaatagaattcatgtcagcttacataaatcccaaaggcaaaacatattcataaattatgaagaaaacatgactccaataataatcattaactaaaaacatgaaataaaagggttgcaatcgtatgaaaactttgaaggagtccctcatttgtatgttcgctggagtattgagaattttgtgaccttttgtggtcgatggtgtcagaatttatattattgacttatataaaatgtttaatttattattgagattatgaatgactagttcctttctacccagaattcaaagttccttcagtttgtgtcaaag

SEQ ID NO: 14580 - DNA, 1424 bp, Aquilegia coerulea
  Intron number 1 from transcript AcoGoldSmith_v1.009866m (l ocus AcoGoldSmith_v1.009866m.g) derived from phytozome v7. 0 (chr-ID scaffold_7; pos 531181 to 532604)
aaagagaactcttgtgctggtaattttttttcataaagttttgatttttaataacataattgatttattaatttgatttatggtttgggtattttataattttttgtaatattgaaaatttttgtatttatcatgcttttatgcttagtagaaagttaaatatcatcttaattgtgatctgaaaggtcgtttaaggtttttcgcattgaaaaaggagaactttttattcccccttattgtgatttggattaggagattttttttttgggtgtaatgttaaggttgagtaattgtttttttttttatttttttaaatttgtattgtagagttaataattgtttttgtaaaaaaatttaacttttttgttgaagttaatattatataatgatgttttggaattaaagttaagctgattgcgaaaggatgaaatctggtatatgtattatgcccttatagaatctgagcataaaggagtcaaatgtttttatccttttataaggaaacttagttttatcctttagcgtttttttccaaataccatgtagatgtcatcttgggattcatatttatgtacctatccttaagcatagtactaagaattaacacatacaaattcacaactataagaagagatatttttctccctctttcgtacaggcaggccttagtttctgtaattttattatagattttaatcataggtaaacttgtattaattaacaaaaaaagttatatgaaaattgattgtcgaaggtattgcacaatagaacagatgcatgcaagcatgttattttggtggttcctcgaaatcattactacctgtaagctttctatttggttgtgcctttggaacctgattataaggcactcagtttttgtggacctgacgtttagatgggagagcataatcttgtcatgatcctgtgtttttatctctcttttgcatctataagctcactctcacagtgttttgtttcatgaaattgccgtttctgagcatttttttgacataaagtaattgattctgagcaatgaaacttgttgccctaaagttaatttaaccgctgtcaataaattctattgacgggctgaaactcaaaaaaaaagattaagaattttcagttttacgatgcattcatgtaggttattctttgtgttcaacttctatgatgcagattagtttatcactttatctatttttatccttctcaaaataaaataaaaaaatgttttgtttgctgattatttataataaattttttcacaacgatttgtaaattatatgtctgggttgttattgtcttttctgtttatggtacatattgccttttctatcgcaacagtttctaggttttgatgttttattggttgttttgtttttcttgcaggactttcactcaaatcgcaggaactaacagctctg

SEQ ID NO: 14581 - DNA, 1783 bp, Aquilegia coerulea
  Intron number 5 from transcript AcoGoldSmith_v1.006494m (l ocus AcoGoldSmith_v1.006494m.g) derived from phytozome v7. 0 (chr-ID scaffold_1; pos 9412009 to 9413791 reverse stran d)
gtgtaccatattctagaccgcgttatttttgcctggtaatttttttatctgtctctcatgcacactattacacaacttttatccattgtattcatttaattgtaagatttcattatgagttaatgccctttaattgttgaaaaatcgtgaatgaacttgttttgagccttttatgtgataagttttgcatgttttttttctttttgaattagtatacatattagcctagcatccactttgtttccaagacttttttgcagttcctttttctattgggaacacaggatagttttttcacttggatttagttccttagccttgacatctctgttaaccacttgcccataaatacatttgcatcagatgtcagtttcttaggtcagatgtaagtctcacattaacatcggaagctttttccccaattatacttttctcttgtgacttattaaattcgagtatttgtcttgaactgaacttgtctggcttcagttcattccatcaatatggtctgtagttctgtaccaacttcaactttattgttattctgtgattttactgagtccagccatgtcatgctgaaaacatcttaaacctttgcttgattagtccacctattcaaagttgggtccaaaggtagcatgtggcactgcagcaaatagagagcaagtgcaagatctctttgatggaaagatgaaaaactaagttgctcagctatcttgagtagaactggatgttgcttgcatattttgtttatattcttttctgatttatctcgaccacactgatacccatctttactcatattttctttttcagttttcggcttacatgatcttagttttgaattggactatgtaataaaataaataaataaaacttggaaatagtactttttactgcatgatatatcatctgatccagttgtctgtatcatagtggctcaatcgatagctaaacagacaaatgacagataatagattgtcttatttactcagttattctttcttgtgatgtcatggagaaacagtcactacgttgtcagtgatctactgatctgggagtgcaccttgttcaagtagttgggttctgcagtggctactaccccttaattccatataaataaaaataagaagaagaaaaagaaaagaaaagagaagtttggagttgcagtataaagggatccatcttttaatcttgttagtcgaaaatatgaagtgcggtagaggttgacattgaagggataacaatggcattgaaagcataaatcatcttttctgcaaacattgcaacttaactgttggattagggaatgagagtgattatgtcttctttctgcttgataaaactgggaatttgcactaaggaaggacgatgcgatctcctctcatcatgtggtcctcaacttttaagacctcttacaatattacataattgcatgagatattcatgcccatatacaagactttaccactgcttatctgctcaatagattattctttgttttcgaaaaaaaattgaacccttattccatgagaaattgtaaaataaaaatgcatatagagtttagggctctaggctggtttagtgacctttcttcctgcatttgccctgtttttattgaagaatgttgttgagatatttagtcccacatactaaatgtttgatacgggactaaatatctcaacatatgtcgtgcatatatattaaaacacttctagtacttagaacttttataactatgttttcaggcaaaaaggaaaccttcagctttcaaaaatccaca

SEQ ID NO: 14582 - DNA, 1141 bp, Aquilegia coerulea
  Intron number 5 from transcript AcoGoldSmith_v1.012127m (l ocus AcoGoldSmith_v1.012127m.g) derived from phytozome v7. 0 (chr-ID scaffold_13; pos 5523304 to 5524444 reverse stra nd)
aaggaccactggaggccttacgaccaaaattgcaggtacttggtctttctttttattctttctttgcctctgttagttccacagtctgggttgtctcgttttttttcctaccttaaagggtttattcggttttaatcttcatttattttcttatatgattgatttgattagttaatgatgtatttagcatgtttcttactattgttcatgaacctttaggtgtatagctaacctggttgtaaaattgacgatagttggatgaacctgattgaactaattgagtatattcataataaaattcatcaatcgacaaaactaagataagaccttgctttcatgagctcgaaagttagtcagtccatttacacttaattcataagttgatctagtaaatcttttttggcttagtatagtctgaattaacaactgagataaacttatgataaagcctgtcagtccaagtgtaagggattttatggatttcgtgggatggtaaaattattgggctgttggttagttccactacaattttttttgattgtacctatgagtcatacgctcataccttcttgaagtcaatgcctgctgactatgggcaactctcattacttacgattagactattaagtgtagttcacgggcccacgacatttcatttgatttaatacagtatatttagtaagaagcatattatataaatacttcaatagattagtcgttactttctttttgcttttgtgtgttatcttttattgtgtgtctcctattcacattgatcacctttggtttgctgatttctcctcatagcagaacgataaaaaaaaaaaaaaaggagaggaaactacaaagaaacctagagcaataatctctcttttgtatataatagctcttgtaaatatacatcctttaaatatccactgtctcctaagtatggcttgttttactggtcacctaatccaaattcctgatacccagatgatcttgtatataacttgaacattttcttacccttactttggatgagtccctcatgaaattttatttaacggaagccttattctgtacaatttagcttaattattttttggtgttttcgacttctgtagccttcacaacaacaatcacgatcacgcagatcacc

SEQ ID NO: 14583 - DNA, 2452 bp, Aquilegia coerulea
  Intron number 1 from transcript AcoGoldSmith_v1.022957m (l ocus AcoGoldSmith_v1.022957m.g) derived from phytozome v7. 0 (chr-ID scaffold_41; pos 1532103 to 1534554)
gtacgaaagaagccgtcaaaagcctgacttcacaggttcccctttcttcattccaattctttctttaattctctctctctctctctctctttcattatttttattttttttcaaataagcctagcttaagaataaagatagctaaaatgagttctacacttgtgtctctttggtctagaatctttagatagatagagtgtttgctttgctttatttttcaatcaacacaattaatacaatgtacacaagagtctttgtttctttacttttctgctcctcgtaagtcgtaacaaccaacaaaacctctttcaaactctaaactgggaccaccggaccattctttaaagtgttgcctgcacctgtcctacttcctactactaaatcattcaatactatttagtaactctctgtcccttgtcttaaaaggatatctctttctcagtttttctctctctagtttctacccaacaagtcttgggaccctttctttcattccctttaggaccaaccggaatattataagttataacaatcagaacaagtgaagtacccagtacccagtaccacccactttattattattattattatgtttctggtaactagatagattgtattgcataatgcattgcaatgttcctcaacttattttcttgtagtacatacagtattatgatcttattttaagtgaactaactacttcaactcttcaagtgaagtgaggtggtggtgaccctaccaaacaccaattctttctctatttttggatcatccatatatatttataattggatggtggattgatgggtccagactccagaccctgcctctcactctatgcacttttctacccattctttttttttttttttcattctaacttaagaatatagtattgtatttgtggaatttgctagctaggaaaatatcttcagatccaaaaatatttctgcaaattcaaactagggaggatccaaatttcaaaatatgaaaagtgattttcttctttctcaactcaacctaattagtatccttctactgatgcattgccattatcaatactggagggtgttcctgactgcattgttttgcttaggtcctaactatattctatggtacccaaaagccagatcgattaagacatgagttccaactggattctcaggggtcataattttggaagtttcatcaaactaaaattttgaaagttggaagctgatcaatgaataaattgatgctgataatcgtatatacgacactatatgatgaaacaaattatttttaggatacaaccacttaagagttaagattttatatatactttttgttctataggctgggtggagcttaaaacaatgtttagagaaagacaagaaatgatattcagagacaaaccacttctttgtctggtctaccatacaatttttgttgtaaaactactgtctacatgcacttttgtagtctgagtggaagacatactaaacatttgagtctgccatataagaagataaattgataagagaaaacatcctagtgcgtttaagttgtgactcttgtgagtgttcctttaactaataatcgtataatatagttaaatacactcagattgaatgtagttgcagtctaacagataccttgtacattgattgattataagttggtcattgttatgttataaatgaataatagtagttgtatggttgcctttatctataacatcatcgtcatgagggatcaccaatttatgtggtgatcaaaccccttacgccactacccttacaagattgtgatagttaggtgcttatttcaggattcttcggaggcaattatattgtaaaacctccaagatacttacaataaaataacagcaatatcaattttatttcagttgaaacttgtggttggtaagttcttttagaaataaaggaaaatttgtaggaagaacttcactgagacataataaccatatggctttattagaattcagttcttttgacaacagtgttatgttatgaaatcatcataaagacagaacagaaccgggtgaaatatggtgtcatatctattctacatgaaatttgagctaccctgcctgtggtaccttcaagtgaccgtcattgatccttttttttttcctgcatttttcaggacttgtctatcttccatttatgaacagtaaaataattaatcaagctgtgtattttttggtgatgaagattgtctaatccccccccccccccccccccccccccccaccccacttggtactttgcattccatttcccttagggtctcaccagctctgcttgtattcttcccccaccgtagcacacattcctctccacttcgggtggatgttttcgttgtgttgcaatactctacttatttctatgatgggaattcataactttggtcataacttggaagtttctaataaatgcagatcaaagat

SEQ ID NO: 14584 - DNA, 4499 bp, Aquilegia coerulea
  Intron number 6 from transcript AcoGoldSmith_v1.002174m (l ocus AcoGoldSmith_v1.002174m.g) derived from phytozome v7. 0 (chr-ID scaffold_47; pos 438788 to 443286)
aaaccgaattctcttcctacaggtattttgaattgctagcctttgttttgaatgttgtctgtgatcctttgttcttcctcaagccagtcaagaattggtgcactttatttttggccataacatagttgtcatatccatgcatttatgtcctgtcggctgatttgtcatagttcaaataatagttttttacaattaatcgatccctcaaaaaagcattttttatgtatatgttgcaaacaatcaaacgatttattacaaaatgctataaaataattgatagaaaaaaataccattatagaacagatttggattagatttgagagagagtcgtcaatactataaattttcgaaagagtaacaagtgaacaactcaattaaatctccaggattcaaggatgatctttccagatttaaatagatctcggaattattgaacactgatctggaacccattgaatactcaaaaccagccagaccacatacagctcacccctccctgccgaccacaaaaggccactcctccatcgtcaagagttctaacatgtcgtccttgttttcttcctctgttgtccagtggtagcgaccactggactccaaatgtcttcctgcttcaattcctatagctccaaagaatttactgccaagtcctgcatccgtttctcacatatcacctatctccttacccatctttcaccacagctcggaatatcatcaacctccttttttccaaccactttgtcatcaccctcgatcaccattgccttaccacagttcttattaatcagattttgtgttggctgacaagtacaatctgtttttcctttgactgaaaaaatattatttttattgatatatagccataaaaattacatcaattgtttgaccattaacaagaaattaaaagcccaaacaccccaaaatggacattacagttttcctatggaaagaccaacgaaactcatgggttgaatagaggagcagccctgaaaaaatgccattgatgctttcctcctccctaccacacatgatgcatcttttcgttataattttccccccgatttgtcgtggtgagttcttctgtgcaacaaggtccacataaagagaagaagaagaaaggattgggtgttatgtacttatgtttgagttccaaacgatcctcttctgcgaccccattagaaagatccatcaccctcttagactccagcatctcaaacactgccttgaatgagatagttcactcttctataactagagtaatttgagcaagaacttgaatagctgatgaagcccaagttcctagtatggggaattatcagggcggttgtgacttgtggccacaagcaagttttttgaccgttgcttttattgacttgtaaatagtttcgattcagccactaagataataggatttttatgtcccatatggacaccaccccattatgggaatcatcttgcttttatattgctgtcctctttctcttttattgggttacgaaatccaggtccctcctttgaactttataccacagatttatctcaagaatttgattacttggctgtcatgaaacttgtaacagccaaggttatgcaaacggtttctgagaatagcttcacatacatattggtgtgacaactagaaccaaggcctcaatttcagagtcccagaggcaacatggcatctcaaataagtagtcaaaaatataccaaaagggcctgggactccgggagcaatgaaaacaaacatataattgatttgcttttgtgagtgtccttgcgtggttgaagtgtttcgtagcttgattgttgtcaccagttgatcacttgattgaaggttgacgggtacatgctctgttttcatgttctatttgcacctccccactatatttgtaattaatacagtagtggtccatctaaatccctagattttttcgaaaaaaaaatgttcattgaatgccaagatagggtggagtgttggtaatggaaattgatgtaggcacattaagatgttgatgtattgtactattgtgcctacatcattagttgggcttgataaattttattgtttggtcaaaaaccgttttggatggatccacctaacgatcgtaatatttggaataaacaaaaatagaattagggaagaagaataaggatataataataattttaaataataacaaaattttaaaaaattatttgggcttgggcttgagaaagcccgcagttggaatgtttgaccttatagatttgatttgaaattaataatgagatttttggacatacccccccatttgaaagtcgaaatttgagatacccccccatttgaaaaaaaattgagataccccccaattcaagacagaagagctttacagccgtaggtgagttttatgatggacggctaagataacaccacatcttgaattggggggttatctcaaaaaaaatttcaaatgggggggtatctcaaatttcgactttcaaatgcgggggtatgtccaacaatctcattaattaataaaagtggaattagaaaataagataaggggtacgtcagtaattaaacagattacagtggtgaagcaggcaggtgcagagtgagtaacatgcctcgaagtgcatcccgcttctaaagattaagatatgtttcctttttaggtttgagtcttttattgtttgtttcttggctagcaagaaataattggtataaataaggcactaagcctcctttgttaaaggggttgttgatgaatgttttgacttttgattaaagttattttttaggttttgtttattatttgttaattgagtaagtttaattggtcgtcgttgttatcgttaaatagacgctttcactactataatttttatcattttggtatcaagagcaaagttttatttttttgttagaaagttcttattttttggagttagtgttcatcttgagttattggtcataaatatattttttgggcaaatcttgtcgaaagttgttattttttatttgctttaatgggttcggagaaaaatcctactaccatggaagttcgtcttgcaaagattaaaaataaacttgcaaaactcgattccatagaagctatgttgaagcgatagcttccgctacccatatggacctgaatgaacttgttggtttatgggtagggtttgacaagtggaccaaggatgttgctgggcttgagagaccacatgtgtagaatttgggcggctgatgaaggagattaggtgaaaaggaaaaccaacctgtgacatgtgagaaggcggtgagggatgtgaaaaagagggaattgacccatatgtggctgactggctgcatacacatcctggtagctgcaatgaaagcaattgtttcatcataacttctaaagaatcaattttggcaagtttattttcaatctcttcaacacgaacctccatggctgtaggatttttctttgaacccattagaaaaaataactttccgagccatcagtgagataccactctggaagagctcgaattctaaccttgtgtcaggagaaaaaataactttccccccaaaaattaaaaaataaataacaactttcaaaatctacccaagaaaaccttgttgattccaaaatgatagaaattagagtagtggaagcgtaaacttaactataaacaatgacaaacaaagaactaaaaactcacaacttaatcaatattcaaaatactcgtcaacaagacaacaacccccctaaggaaggaggcctagtgtcttatttatatcaatcatttcttggtagccaagaaacaaccctaaaagactcaaacctaaaaataaacatataatatatgacgtaggcacaatgcatcaacatcttgatgtgtctacatcaatttccatcagttggataggtccaaaatcagaatttgcttgaaaatattatctatgctataatatagttgtgatttgaaatgattggaaaggagtttttagccacataatgtcagcaatatcatctttgttatattgttacatatattcttctttcgatatttatgattggaaatgagttttatatgtacccttatttctttttttgtgtataaaaagtgtattttcaatacagaatatgtgagcaatactttacggcgcacccaagtgcacctgagtggaaggcgtgggtgttctgtaggtttggggtaatggggagtgcacctagtcggggagaatggaaaagtccctggccaaagggatgtagctgtttgtattatggattgtatttgacagtggagtttaataaaataattttactcataaaaaaataaaaaataaaaaaaagggaaaacaatactttaaaatggggttttgatactcagtatgtgatattggtaaataggataacttacatttcttgaatgtccgttctttgaatttgatcttatttttattatttagttctacccctgtcggtaaagaaacactattattgagtgaatttcactttgacaatgcagtgaca

SEQ ID NO: 14585 - DNA, 338 bp, Aquilegia coerulea
  Intron number 1 from transcript AcoGoldSmith_v1.021967m (l ocus AcoGoldSmith_v1.021967m.g) derived from phytozome v7. 0 (chr-ID scaffold_5; pos 480543 to 480880 reverse strand)
ccaacaccctggagcatgttttagaaaggtaagaacaacaaccaataattcaattttagttttgtgtttctttcaattatcacatcttatcttatctatcaaaacgatttcgattattagaactatcagtttctaatttgccaaatcatatagaaataattgaaataagagtgaagcgttgttgttgttgttgtcaattttgataattagaccaactacaacaattattttttttttaatcgagttcaaattgcaggtgcccagcgttgaagaccctaattctgccagattttagatcctacctagcggctaaagaaactaacgaatgttttctgaag

SEQ ID NO: 14586 - DNA, 1127 bp, Aquilegia coerulea
  Intron number 1 from transcript AcoGoldSmith_v1.006150m (l ocus AcoGoldSmith_v1.005727m.g) derived from phytozome v7. 0 (chr-ID scaffold_30; pos 2371553 to 2372679)
caccaaattatctttgaaatattcttcttctgctggtaagattattatttcttcttcttgtttttttttttttttttttaccattttgttcttttttgatttaataatagatattaatgtgtccattatcaattgttcatcttattatatctaattttttttatcacatttgtggaatttcagaacctgtaattttaaatgaagcgctaagaattatttatttcgctgatgtaattaattaattaatatacttacttgttagctgatgtgcttgttattttctcactttatgattaattggaaaactggttatctccaattattctaacaatctaacatgggggtatagagaaatgggtgttgttattgaaattgctctgcattatttcgtaaaccagctatataagaataatgaagattacacaaaaatgccaaggggataggtatccatggttgtagaaacaacaattaaactacaaagtacaatgaaccgccaaaaacataacaaacttgagatgaacaacaaaaagatgcataagaaatgtctgtgtagttgtgcctcctgttgcaccaaaggaatgacaattctttgattttaatgatggcaagagcaatatctcgtgactctcccgaaagatgtctctggttccactttcagattccacttcaaccaaatgtcctacaaaatcacgaatgtatatatagagttgatttggtttttagttgcagattcataagagaataataaacaaatgagaattcattttggctttggaggctttacaatgaatttctcaatggttgatggactaaccgactaagggaaagttgaatgtgatggtttgaccatatgtaactgtaacgcataccactaaggacatacattgaaaggagtttgtgatatgatatgctccagtttatgacatgctctggatctgaatttgtttaagaatacctattgaataatcagctttagctttaaaggtggtcatgcaaatattctcaagcaattgcattctgtttttagttttcagtaacaaaagtatcaaacctcctatgtgtatgtaattgttatgcttatatcttctctaaaaagtaaaaactgaaactggtactacattgtttag

SEQ ID NO: 14587 - DNA, 923 bp, Aquilegia coerulea
  Intron number 7 from transcript AcoGoldSmith_v1.000870m (l ocus AcoGoldSmith_v1.000870m.g) derived from phytozome v7. 0 (chr-ID scaffold_55; pos 35461 to 36383 reverse strand)
agcttatatcggtagccacctttaggtaatcctattatgtcaagtaaagtatttttttctctctgggaataatatatgctaatagagagtctataaattataaagaacttggtaatattcttcggaatacttgcctagtttacgttcttttgtactctcgaagttccaactgaactaaaatacttgacctaatggcgagcaaaaaaagtaaaaaaataaaagattgcaaaataatggtaatatcttcttcacttgaagtggttgcttatacatgtgcttgagtacagataaaaaaaatgatgttctctaaaacctttgatggagacacatggcagcagaaatcaggaacaaacaacctagaaacatctggaagtctttagtatcatttaatgtttcattttgaatagtagtcaaagagtcaaatctgtgtagaataagtttagtcttcctaagtgtctagagagttcttataaactctatataaaggtgtgtaagcctttgtattagagagaagatgaagttagagaaatttctagcatctttgctgtgttaaggattgtgcgatgcaatccaaccctttgtgtgatacctaggtccctaggagtgattcctagaaccctactagtgtgatgctagaagtttcgtcaaccctagtagtgtgatgctagtagttttgtctatatttttcttcttctattattctcttcttgtattcgattaatttcagcaatcaatcagttttcaactacaaacataacttttccaaagttttccctatctttttcgacatcaaccttgctatgatgaataagttgatgtcataagtgggtgcttccaatcatgtttatgattatttgcttgaattagtaggcaaattacttccattctcaatgtttcaaacactttttaattatgcagaatac

SEQ ID NO: 14588 - DNA, 1005 bp, Aquilegia coerulea
  Intron number 8 from transcript AcoGoldSmith_v1.005994m (l ocus AcoGoldSmith_v1.005994m.g) derived from phytozome v7. 0 (chr-ID scaffold_1; pos 2278315 to 2279319)
actcttgcagcattagcgggtatattttcaatgtttttatctatctattcttctattataaactcgagttaaattcaggggtatgcccctgctcataagaattggcccttttgaaatttttgcacattatgaccaaactacccttaaaatagggttaatttagtacatttatgaaacaaaagcaagggatctgaattatagtaattgtaggccctttaatattctattcaaaataaaataaaaaggctaagatatatgggattaaaatcattttaacccagaaatatttctgtggcatatcatgaattggagtatgttaatagtagatgcagacaagctgatgcccaactcttattaaaatccatttttacacttaaattaattgttcttactactaagtactaactgagcttaactgttgttctcataaacaaaacccgaaatttgatcaagttttatgcttcactgtatccatttgtctaacatatgacctatgtttagaataatatgaagtattcatgtcatgtagcatctaaacaggattttaattaggaaataggtcatttggagttcgaggagaatgctttttgacttggatttgagttattaaagatgaaagacttgaactagtcaagattctaagctgcattagcaaacaagtgagtgggagacaggattttttcaagatgtttccatgtcatgccttagtaggacacttctcttgcgcagaatcagcatacaaccagatgattaggtacaatcacagtttggatttggtccaaatgttttgtatgaacctcagagttgtaaaggaattaactataaaattgacgacaaagatgtttttccctttttttttttcctgaaattgaaaattttacttgacaaaatagaaaagctagacattctattctcagctggaaatttctagaactatccttgataactctgatcatctatccatttgcaggggataataagaggctcatcacatcaccaccagtt

SEQ ID NO: 14589 - DNA, 688 bp, Aquilegia coerulea
  Intron number 6 from transcript AcoGoldSmith_v1.014083m (l ocus AcoGoldSmith_v1.014083m.g) derived from phytozome v7. 0 (chr-ID scaffold_3; pos 4918602 to 4919289)
tgcttgaatcagaggaatatccgataccacgggaggtatggattctatcatcttttaaacccgaagttacttttctatttctctggttgtataatctgtcgctgcagctgtggaaatatatctggacacgagtaaaactcctttcaataaaaaacagtagccatcttcgtcctagtagtcttttaaactgatactactacggattttaagttttttgcgaccatcatttatttccttggcactatccaaaaattctttgtccgttgacaatttaaaccaaatattacgtgtgcgtatgcaccatcttagttttctcgtgctttcttgagtttgttgctgtagtttactgaaaagttttgagacatccactactcgtttgggccttgagaaaaataaaaacatcacctattatagtttaaaatatctcaatagatgccttcataaaattgttgtagttcattaagtaatgggtctctgtataatcgtgtgcaatgaacctactgtagcattaagggctttcatacattctaagctgataattttgttgaatactcttatgtttttacctaaccactagttttaatctcaaagaatatggataaatgtgaatggacgggatttttttccttgctgtttattgatattttaaaaattacaggatcgaaggcatcgaaagagtcaggctagt

SEQ ID NO: 14590 - DNA, 4119 bp, Aquilegia coerulea
  Intron number 2 from transcript AcoGoldSmith_v1.007683m (l ocus AcoGoldSmith_v1.007683m.g) derived from phytozome v7. 0 (chr-ID scaffold_60; pos 226904 to 231022)
tcacataccattttctcagtatttggaaagataaggtatgggagaaaaacatgtggtttttatttattattgttcttactttcattatgctacaagttataattttgagaatttgatacatacttaaaggagtagttacaatgtcttagttttactctcactgaattatactgatgtgaatttaacttacatttttttttcatgaaatcacaatgatttcattaccaatgccacttcttttgcatcaaatcactaaatttagtagttaggttcaatcatgaatgattgtataacaagataatacccaactgcacgatataaattgttaatacacattctgtgtggtggtaggcccctagctaaaggggagatgccttgacgattttttgatttttgtatatgataatcaatgattgaaaacaaggagaaaatttacaaaataacaagctttgattttatggttaactagatggtaggagaagtaatgcttcataattggggagaaaattttcccgcagccagtttgccttgagaaaacttatgtttctatataatgagtatgaaatagattgagagtcgacgagggtttaactaggaagggaaaaagagttcagaattgattacataatagggcatgcacaatttataggagtccttaactgatcgggttacacttacaacaccattagtcacaaggttggtgtctcccgcgaaatagttgctggtctagtttcccaaaacctctgaggtgcatgggaaaaacatgtggaatggaccaaaaatgtttggaaacttgttgcaacttgcaaagcatatggatggatctagtttgggtcagtcgggggatacatgcccccccatacgttttgaacaaaaccccccaaaatcaataaaaccctaacatcaacaaaaacccctaaaaatcaaaactttaaataaaaaacaaggtttaaagtgttgtttttcactcacttggtccatttcaacttccaaatctttaacatctttaatccaatgatcttgtagaagttgaaagcgttctttagctagttttcgctcttcaagtataacttcatcatgattttggtatatagataataaggttttgaaagcttgcttcaacttgtccatgatgttgctgttgttgattgggaaaaaccagtaagagagtgagacttagagtagtgagcgtgagagtgagctgagattttcagttgggagatcgaattcatatatggaaatttggttgtagaaaatttaggagatcgaacaacattacggagaatttgaagcaaacttttaaaaccgtattatttatgtaccaatattaaagactatacttgaagaccagaaactaactgaagaacgctttgaacttttacaagatcaatgggttaaggatgttaaagatttggaagctgaagtggaccaagtgagtgaaaaacaacactttaaaccttaatttttaagggcttctgttgatgttagggttttaggacatttagtcttcttgagattacttagaaaacatgtcttctcattcctagtcaacgtttccgtctctctatgtcttctagaacataaagaaggttgtagacaatctttcttggaggctaataaactaacttggatgttaataaacagttggtttctcttccaagcttagctgttctttttttctccattgatgactagtgagatgatgtgtttaatgggacccactaatccgatcaactgaatagtttataatatatcaattgaatctgattttgatctgcttcactctatttttttttatatgaaatctctatatactccaagataagttttgtgtatatggcagatggtatatttttgtcgttttactgttctatccgttgtgactaggtaatatagtttaagtacttaacacatcacactttcagcttaaagacttaattattaccaacttttttttttcaagttgatataccaaactattgatagaagttttcaaatgacaggaattgagctagagagtagagacctctcgcatactaggctataaagcataaacagttttttaactgagagtcaaaagcaaacattttaattcatgccatttgaaaataaaaatgtatttccaggcgttcatactcttactaacaacaaagcttatgtatttctcaacgctattccctgtctgtcacaactcacaaggatgttagtctcaatgaaattgtgtccactattcctacctttgctttctgtgggtcactactgtcaaaatggttgtgatctttcttgtgtgtctaatgttaggccctgtaaattgcatgtaattataagaacttttgttaggttaaatgcttcgtttataaattgaaaagaagtcaaggataacatttgcatccaatactccaatgtagctctcaaagttgggaaattgacccgagtttttgaagagacccatgcgatgatactcgtaatgatactaaatcataatgcactctatcttgaagattcaaatcgggggaagcttagtaatgatacctgtaatgtagcaccatatacaccctgctgatgctatttccagttatccactgtgagtctgtgaccatcagcagtattgttttaaccggaaaagtgtgtttaggctcgcccttgtttgattcacaactacttactcttcgatcatgctgcatgtcagctttgagatgtgagtgttgtcgatcttggttttggtactttgggtatgtaaccaattgcccttttttgatataaagagagtagagttaaaaaccgagagtagcggtgatggaaattggaagacgtttgaaagtggacaaggattttttgtgactaagttcctaaattttttccggtttcttgatgaaggatttttcagagccctcctagtgtactatcctaccacctggttagatgaagttcataaaaagtttttgtcgtgagtgtgtttgtttctcctgcatttcattactttattgttgttttggtgcgttgtagtccatttttaacaaaatcaaatctgcatttaaagcttttaatggggttgctagttgattttcaccaaagtgttaatctctatgattttcactaactcttcgaagctaaaaatatatggggatagtggatattgattgattttcaccaaattgtcattgaaaatacggggatagtggatattgattgattctgtaaatttttatagttgaaggggtcataagttgcacgaatgctaaaaaacaaaatggttcctttccatcccccccccccccccccccctctctttctttagggggtcgggggggtccctttgtctctgtggctccacccctgcttactttcaactagaggcatcccacggcacaagttctaagggagaatgaatatccatgcgaatattctgaaagatttatttccttgcatggtgtgagaatggcataggtttacagccgcagaggtcggtgtttgcaggtgatgatgatctgtatgcatatcgtaattgttattgataaataatctgatttagtacagtaattgtaaaacttaggtggagactggtccattcaggactttgcttagggtgtagtcagtaggtttttgagctgtttcctttagatctgtggttaaatggcaaacttgtaatgtaagagtagggtggaatgatgatcatttttggtagtttcttttgccaatttctaattaattaatttgtgggaaaatctggatctcttcttgatgtaatctttcaatttatatttatgaatatctattacttgtcaactaatagataaacaatgcttaaatagcatatatgcaggaagaacttgtcaaattgtatgttcgtatagcacagtgtttgctcaatccggcttggagtgagcattgatgtgaacaccatttgcactactatttttatcttatatgcttgattgcttgaaattagtttcccttttagtcttccttgtccattggtatatttcttttgttcaatcctcctaaagcagccaagccctctcaattgctgatgagtgagccacattgtttgattgcataaactaattgcatgttgacttatgttaattgctgcataattggtgccatataggaaactta

SEQ ID NO: 14591 - DNA, 638 bp, Aquilegia coerulea
  Intron number 8 from transcript AcoGoldSmith_v1.022188m (l ocus AcoGoldSmith_v1.022188m.g) derived from phytozome v7. 0 (chr-ID scaffold_61; pos 1248493 to 1249130 reverse stra nd)
aaatcattgatctcactagtaagtcatcttcacctcaaccccgcttgccaatcaaaaaaaaaaaagtcatcttcaccttgaacatgaaaactattgaccgactcaaggctcaaaagattatttctcaggcctgatccattgagctacaaacatacatttgactcaggtaaagtaaaatgtccagactacctagcagaccgtccttcacacttccaatttaccatcagctgcccaatacctcatttcagccatatattgccttccaattctacaatgaagaagatccagaaagatgccacctcctaagtcctgacaacccaaacaaaaaagtgacgaacagactcttcgtaaattttacagaatccaacattaaaaggaatatttggtttctaaaccatcttgaatgggaatccattgttggatattagcagttacacttgccaaaagtccaacatttgatgcttatccaagattcagtcatccttgattgcatgtcaaagtcctttcctttatgagtcctatcgattagaaattgcaaaatcgagtaataaaaaaaatgtaaaaccttaatttcttttggctgactgcttttttggggaaaaaagaatctgctaattataagtaatatggtcaggtat

SEQ ID NO: 14592 - DNA, 3135 bp, Aquilegia coerulea
  Intron number 7 from transcript AcoGoldSmith_v1.009218m (l ocus AcoGoldSmith_v1.009218m.g) derived from phytozome v7. 0 (chr-ID scaffold_3; pos 2995757 to 2998891)
gaggagactctgctaccgactatatatttaaacaagtaagttttcccttactgatataatatttctttgatgtttttttcctacattctttgtttattgtttcgtgcattaaattactactgtaaggtgatcaccagggttttctttcttcttttttgaagaggtaaactaaaagatatatttatcagaccaaagaacgaacaagatatgccaagggatgagacatccctggaaaaacaaacacaacaaaaggaagtaattacaaactaataatactgagaaaaatcaatgtcccagaatgagaatgcgatgattcagcaggttattgaatgggatgatttaattatgtgcaacaatgaccaatagcacaataacaagatcaacaagtaacacgtaactatgtagccattggtgtttaggcatagaccttgcacgtattgcattctagttaggaaacataatactagaaaagcttaaccacatggaactagttccccttccctctaacctgtccctcaacctggatcatctttatatgatattccttgaattacaatgaagaatattagacactacaatcaaataaaactaccaaagatgccacctggaaaatagataaagttttcctaaatctgaaatctgctggacctatcctagttttactgaggtgtcttttagtgttttagtaatttgcgaaatggaatacaaactcgaagcaatatagatttaaagaaacctggaacacatcaaaggtctaacattaccggagttacttggatgtaacttgtaagccttgagacatggcataatacttacagttttcacattggcggatcctaaaatatgatattttgttttggattttttaattgttataagcagttcatagctgaaatgacaattcaaggaccgataactagttaaacccttaaatttcagtgaccatcatagctggttagattttaagagaaccgatgcttggaggactggagaaggatgatgggagtaaagaagtgaaggataggatagggtttggcaggagatggaataagaaaaagggagggaatgggaaggacatctaggtgatggttgagagcgttctagagctaaacgcctaaacttagttaacagaaaggctgatcaagattctgagtctagcagcagcttttgttggaataatgaagaataggaggagtataacaatgagtttgattgagatatcaacatgggggaatggccccaagagtaggatgttgtaatgttgtttttttaaggaagggggtttcttctgaataaaaactgtaaaacaaactcaaaatagaaatctagtacaaccagcaaaaatctggaaaaaaaatttgtctccattctaatactcatatccctcctgatacatcgatcaaatgggatactcctgaaatttacggttaaaaagaaggttgcactgtgaagtgttacaaccatgccgaaggaatgacaatcgtgggtgagcttaatccgtagtgtattcttcggcatggcctttgtgggtgaaccagaggcgagctaaatgcattagtggcgggggcatgagccacctctactgaataaaaaatgtaaaaataaaaaaaaaaaaaaaaactacaaccaccaaaaacctgaaaaaagaaaagaaaaatctccattgtaatattctgatattctcacccctcctgatacattgatcaaacagggtattcctgaaatttacaacctaaaagcataaaagaccaatttgccacgcgagctttgaacatccattgacaagtttttcaaagatgcaccatatgtaagtagcgtagggaacccaaacctagttgaaatgtttggtcttgacgtttactcttgatatggtgaagagtgaaaacttgaactccaacaaacctggttgttccaatgatcatttaatgtctaataacagtgatgtgatcatgaaaagacttggttttgattaatgaaatgctatcagacctactaatagatggctttgaaaccgtactcatatgatagcatatactacttcctacaaaagcaccaccaacccgaagtttgatccaagctacacaaacctctggtctacaagaagttgctcattacataacaattgtctcagatgtacatctgaggcaaggaagagggctctttaatctcgtttggaaaaatataacaaagacaagttcaaaagaattgagaaccggttgaagtaccgtcaaacactgttggatattgacttgatcgtgctgaagaagattaattattagggatctttgttaaagctgagggaatgttgagagtagcttacttcttagtttgtctgaatcatattgcattcttaacccataaaaaatcaccaacaaggataatctttggagagtagtttacattcttagttgtctcactgtttatatttcccccgtgtgctcctctggaaacttcgctgaccaatcctctcctatgatctgttccctggattatgcagtccttggtccgggctgattgccctcactcattaggctcaaatcatttcttctcttgttttgccacaaggccatgggactagctttcctttccaagaaaaagttttgtggtgcatcatttcatggtctgtatgccatttgttcgaagtttagcttgatcaaaacaaactcaaggaaatgtgcaaggggtgagcctagagcctggacatccagtgtcgtctgactgtctaaaccaattcatcttagagcaactagcaatggagggagttagacgatctcccagttccattggagacaccttttctattatacgaaggtattgtagcagatggcatgttttcttggtaatgttttctctagtaacatattgctataggtctgcttgtcctactttgtgctttgtagtgctttctttcatcaatatttgctcacttatcatactgaagaaaatggtgtcaaatattttagtattagttttatatgcaatattcttattttcatgagaagtattctgtgtgctctttttgttcttacttcttcttaggctatgtagaatgattctttttgtgaagtgaaggtttcacatagtaaataaatttttgcagattacctaagaagctccccgaaggatcacgtgtgc

SEQ ID NO: 14593 - DNA, 2844 bp, Aquilegia coerulea
  Intron number 5 from transcript AcoGoldSmith_v1.005111m (l ocus AcoGoldSmith_v1.005111m.g) derived from phytozome v7. 0 (chr-ID scaffold_1; pos 3731931 to 3734774)
tgatcaattctacataagaggtgaatgcctttctgtcttgatggtttttgttttcttctatgttctactgtttgtaatatcaaataagatgcatcttgcatggaaaattaagaaggatctttgtggaagatattatgtttaatggcaagatgactagtaagcatgggttcactcttttagagatatattttttgcccaagtgggatagcattgtactgagtactgacgactgatctgagcttatcttatctctatgacacaatccttcatactgtacaaatttgtttttattgggcaaataagattgaaaaatatgcaaagatgcaacataaaatcgtcttagacaggaggaaaagagaattacataggtacaatatctacaacctgaaacagtgatgcccctccaactagggataagattttaaagaaaataccaatgcccagaacataagtcaatattagccttaaaaaatccaaacgtctaagagaagatcttccttggagaatttaaagaatgcattgaaaaggcatcaattgctactactaatcttagccttttgaagtaagcatacctatctaacaggaaatataacattttttactaaaatctttctttgtggacggtgtactgatttgacttacttcctaggaactcgcacactaagaagatgatatcccttaatactgtggcactgttaaaatacaaaccatcatcaataagaatttttccaagccactaataagaggtgccttgttagaggtcctttgctgccactccatgttagaaacgacaagcagtggccagaaagatccattgcattagtgataatttgctgccaaataaccttagaaggaagttgtggtatagtttgagtattacccttcatctattggagactagaactgacggtactactttatcactagtaatatctactgaaaaggaaactcggctttataggaaaccattaccattatgaagggaaagatgtgtgagataatggcagaagctttaataattcaatctaaattaacaaaattacaagaaccctaagttcttcactttgtttctgctctgcatccttgtgaagatgtccaactgaatatcttattatttttataagcaattgaagaaatacctgttagaagttagatagattaataccatcagaatagaagtccaattattcatcttctcaccttctatggaggcaagcacatactccatactgcttagggcggtgcgccttttcttagtctgatgcttagaaaggttgatgttatatcgtagtggatgaagatacacacgacagggtgtaagtttggatacaactatatccttgtcattttggatgcattgattatatagtttttactctcttctcatctattcgctgctggaatgtggcccatatgtgttctaacttaagagttatgactcactaaaggactgacaacattgcccctctgcaatgtttggcctcataatcaatgatattgtatatttaccttagttgaaagttcttacctttgcttatgttacttttacccataagcaagtgatctgtcaatctgtgcttaactgcttatgatagatttgaatttgtactaagctcttgattgattactaagtttcttctaaaaaaatctgtagatgatttaactacgtaaattatttgagattatgatggatatacattactatgaagtagaagctgcaattgaaaatatgttctttatgtgcccatgcaatagtttattggtgacatgtgaccgtagatgagcctagagtcaatggcctaagcaatccagaaggagaagaactttcattgtctgccacaacattgtacctctattattacagaaataaatgccaagtgatctttgtagaatttccttcctctttgcgctaacaactggactctcttagtgtctccaatttaaagtgacacgacttattgcatatttgcatctaaatcttgacctattagataatcaatgccagttatatatggatatggctttatgcattgtatgtcagcagctcaatgctacatggaaatctatcaatgctcttaagatgctatacttgtgaaatttttagcacatttaagtttagcttcattgaaatagatgaataatatccataatggcttgtttgcttctcaatgtagaaagggtaaactgaaatattgagctggcatttttttcttgatcttgatttgtttcatagagatatatatctacttttatcgctttgtagaattcccttcctctttgtgctaacaactagactctcatagtttctcctacaatttaaagtgacatgacttgttgcatatttgcatctaaatcttgacctattagataatcaatgccaactatatcagctcaattctgcatgaaaatttatcaatgctcttaagatgctatctttgtgtaattcagcacatttaagttcagtttcattgaaatagatgaacattatccataaaggcttgtttgcttctcaatgtagaaagggtataaatcaaaactgaaacattgagctggcatttttttttccttgatcttgatttgtttcatagagatatatatatcgacttttatcgctttgaaaatgaacaatattggtttcattttggggattataggtttcgtcactcaataagtcgtaactagggattggagacccatattttataggttttggttcgttttgccccggacgtgtcctttcacatcacacattatgcctgattttgttaattaggtgctgagtttttttaataccatattgagggtcttctttttgtacaggcggtggacatagttgcttcaagg

SEQ ID NO: 14594 - DNA, 1573 bp, Aquilegia coerulea
  Intron number 1 from transcript AcoGoldSmith_v1.006686m (l ocus AcoGoldSmith_v1.006686m.g) derived from phytozome v7. 0 (chr-ID scaffold_95; pos 34611 to 36183)
agggaaacagaagcagcaaatcgtttctctttcaggtattcatttcaatataattcttttgaatctttgatttcaatacatttctttctggatttgaagtttttagatctgaagaaatgattctttctttcttattttgaatcattttatagatatatagaaaagatgttcaaatcaaacatttcacataatttttttttgtgttagttatctttaatcttgttcttattcatgtcggatctagtttttttttttttttttattttagattggttctctcttgattgtgatttgaatttctgttagaaatttcaggctttcagctcaatgttttacaatttcttctcatgttttatgatggctttaatctttgacttagattttattttatttgataatctttgtattctctcaaatgtttgtcaccgttgattctaccttggtcacatctcgatgcacatctgaatgaataaaacataaagaggaaacaaacaaacttttaggaaagaaatagatacaagtggatggcatgcttttaggcattgtgtcgacatttcttgtgagtatcatttctttcctaaaagtgttttggacgatcgcatcatgtgtgcgtagcttttaggcattgtgtcgacatttcttttgagtatactttgaagtgggagttggtaggtagataagacaaaaaagaattaataaacaaaaccccaaaagcatgtggaagtggtcttagcgtatttctcattttctccatatatgcagtctctgtcctgttgcctctaaaaatttgaaagagaatagatgagcaatctgcaattatctactgctcgatgtagatattgaactgtcatttggtagcagtagtagtagttaatttaatctgttttcttgtttaaccaatttgatggctttactatagtggggggataagaaaatgtcttgttattaattgctgaggtagacatgtaaatgtaatcttgggctaagagtccgaggaccagaacaataaattgtggactatcttttgtcttcatttgagctcccttctttccttggtccaagtgttcgccaaattgcttatgcatgttcatggggcttaggactgctatgtggtcgccaaatcatcttcctaccatcacgcctcttgtgtgtgtggccgtgtgggttggtgtgaagccggggtttggatattaatattgaagatcggttatgaattcttgagcattaaagctgtagttctaatgtctctgtcattaggttgtgctaatttaggtcctctaaaattacctctcagatgtaataactcataatagtgacatttcaacataggcaccaaatttcaaataaaatttctgttgggaccagcggaccctacttgccatttccatcttattaggttgttgctctgcattcttaattgatgaatataacattagtctaaatgtctgtttaattgagtattgaattttgttgaccacttcactaccactgactctttgaccaaaaaattgtttttgtaatctaatacaatctttctttccagatccttgaatctgatacatagtcaagagca

SEQ ID NO: 14595 - DNA, 1795 bp, Aquilegia coerulea
  Intron number 1 from transcript AcoGoldSmith_v1.027369m (l ocus AcoGoldSmith_v1.027369m.g) derived from phytozome v7. 0 (chr-ID scaffold_60; pos 656021 to 657815 reverse strand )
gaagtaaggctttaaatgtgaaggagatggatatagatggagtagaatgtcctcatccaaaacgaaatgtttcattgctgaaactaacataattgttctacccaatggaacatggatatgagtggaccattttctacaattgcagcaaccttcctcatcgttatgataaaactgttaaggaattccatcttagttgtctagattattctggacgacgttcttatgcttttccgagagatgaaagattttttacaacagaaaaggggattcatttatatgtgcctgtggacatgacttctccaaggaatttcctaaaacttgtcctcctaaaaaaggtaaaatgtaaaattgtttatttaattttttcttgaatatttatgtaatcggctaaaaagtagtcagaatcacaagtagaatgtctctctgagattattactattattactttagaccaggttctttgattctttgtaaattttaatttaatgtactgttagatcaatagtaactgcagccttgaaacagagtttccgactagctacgtataacagtttattaaaaaacgttcctactgttatttcttttttgctttgcttttctcatgaatgatgtcagtgttactaccatcaagtaataggttattcatatggattataagcttttccaatttctctgggaaaagagcattaaagatacataatagtttgtacatatatacttaaatcctaaactagccaagtagtcagcatagctgtattttctaaatacccttaatgcattgtcaaatgtgttgtgcctggcggaaacgtaaagactaacaccattgataattcaagaataaaaaaacaaatcaatgtaaaataaaaaaaaaaaaaacaaaaaaaaaaaacacaagagaacttacgtggttgggcaatgggcaattgcctacgtccacattacaaagagaatcagttttattaccaaagaaaaacaatgaatacaaatacacaagagaaaagtaatacctattttgatacaaaccaaagtacctctctcacacacaattatctctcacatccaatttttcaaagttctctacttgttctctctatcaacacatctatatataacccttagggttatatggtttccaatatatagatcaaagttttttccatattacataaagaagataggaaccatgcatcatcccataacagctatctactcatcatttaaagtgaaatgctaaggaagacttgaaggatacataaacttgttttattagaacagattctgatatcaatgatgctatattaataattaattacagtctcatgcttctgtgtttacaacatcttatggtttccaaaagcttatacatacgtactttaaaaataaaattttgttgtcttgcgcagtgtccacaaaatctcactcaaagacactgtaaattcgttttaagtttctgtcttcttttgaatggaagctcgtattttttttacctattaaatagaacaatagaacaatacccctaaatttatttattttattttttgtactaaacaaatgttgtgattattgaggtgatacttactaatgattaactcacgcatgcttcatgcttgtaggcctatatattggaagaaaggtcttaattggtaagctaatcattcattttactaaaaatccttgacttattcttcttttatctgttgtgagttaatccacttcgatgttcataagtgtttcctctggagttggagtattacttctagttgtactcctaatatacaggaggaagttgttttct

SEQ ID NO: 14596 - DNA, 3019 bp, Aquilegia coerulea
  Intron number 1 from transcript AcoGoldSmith_v1.008925m (l ocus AcoGoldSmith_v1.006181m.g) derived from phytozome v7. 0 (chr-ID scaffold_25; pos 2650338 to 2653356)
tggggaaatttaaggctactgattctcctttacctgtaagttttctgtttccacattttctttgagggtttcttttgcacttaagtcattttttctatgcgattttgggatactttggtttgactggaaatttaactaacttaaattgagtgagttatgcataatacttactatgttggactgtagaaattttgaatactaggaactaggaagggattagatacacgaaggccctgcttgctatgctctaaacacaaaatctgtttaaagtgacataagggagtttatggagatatttccttattagcagctagactagataaacaataaatattcaaggatgttttttcctggctttctctcgataaaatgttcattttggtcattgtactttgcacgtttttgcagtttggtcacaacactttttttctgtcagtttggttatgaaagctacatttcgttatcagttcagtcagtttggtcaacagagttgttcttaacgaagatttaacttgtgactaaactgataacggaatgtaagttttatgaccaaactgagagaaaataacttttacgaccgaactgcaaaaatgtgtaaagtacaatgaccgaaatgaatattttatcactttctctctcaccctctaaatttcttgcaatatgtctaaatgtcatgcaatagcagctagccaaacaagaaagattgaagaatgtatcatatattgttggtccttcattttggaatttgcagcataccaagaagggtctgtaatccacaagcatttgttatcgtttatattttttttattaagatcgcagaataaagaaatttatatcgcattatccgaaatataatgtccgtcttttataaggtcattgaatctcaagtttctggctctagcttggtgaaagagccattcctaaagtaacattttcactctgcatttgatctgctccacagtagccacgttcccttaaaaaatagttctttattggtccaaaccatgtcacctcttcatttttcctttggtagtaagcttggccagctcatcgtacttaaagtttttgcaatgccaccatcgaaactgatttgtctctaaaaagagcactcccacagtgctcttgtcagactgtattgcaagaacagcttaacgtcttcctcagctgcaaggcacattgtacacctactggccattactatacccctcctcttgaggttgattgtggcaagtactcgtccccatgtgaaggactacacaaagaagcataccttttttgggatcttggcataacagattttattaaactttactcaagttgtggagatatatagaactataggttggactttcaaagaaacttggctggacttccaaacaaggaaagggtcctcatggttttgtcctgtggaaaagcatccaagccgagcaggatactttttttgcggcatgctcctcagatttacggattcgcagggggcctcaggccctacttagttgactctgttgagttcatagtggggaaaggaaccaaggtgaagttctggcttgacaactgggcaggggaaggagcattaatagatagatttgcagaagtatatagaattgcaaggaagaagagagggacagttgctgaacactggagtcataaagaagagggtggagcgggaacttgcacctaaggccacgtatttgggactgggagattgacagagtggtggatctcttagcgcagttggaagggagataagtgaccaattaggaagaccaaatcacttggagggactctaccagtggtctctttgttgtgatgctatgagcagctcaggtgtgaagaaactgcaaatcagaatctgattgttcccatcagagcagacgtgatatggaaggtgaaggtacagccaaaagttaagttctttatgggtgcctgccatggggtaagttgcagacaaaacatgtcataacagaaagtgaaatctgtaagcaagctccagagtcaattctgcatctatcttttaggtgctcactggtgagagaggtctggttccagctggtgaggggtaggatcgcctaggtctggcaactcctaatggaaggggatgtggggaagatactacagtctacagaactagcctagaggtggaagtgatgctctaggggctcaaatttggaagatcctgccagctgctgtgctgtggacagtatgggaaagcaggaactcaataatttttgaaaagcagaaggttaaagtcgaccaggttgtgacaagtgctaaatctttctgctggtacttgggggatgcagtacacaaaggggacaggtttgaggagttaattactaggtgggatgcgcgcactaatgagcctatagagagggagaacagtagttgtggatgcatttttctttctgctcctttcttgttgttggtcagtgagttattctctcacctgcctcttagctgatgtaaacttatcattcataaaatgaaagttttattcagctaaaaaaaatatagagatataggtaagagattaatatcgctgggatgggcaactgggatatagcataaatgaccatggtaatgaaaatgcatgtatgtctttttactttgtagttaaaaaccaagttacgtcttaagttttgccgtgcgtactgaaaagtaccttacttttgctagtgtggagtttggaggaagctttaaataggaaaaaataccgctagaaagacatacgaatgaagtgtgtgtgtgtgttgacaactgtacagataagcttagcttaatgatgattccatagagtaaaaagtgatgtatcaaaatgtacataagaataagttgttagccaatccatcgatcactaatatacgaactgggaatgagataagtatgacaatttttgagaaaatgatgattatgtggatgatgctgtttttatttaaacatattttattgttgaatgtgatacttggaccatattttttttgtttctgaatggatgttttggtgtagactgttccaggct

SEQ ID NO: 14597 - DNA, 1255 bp, Aquilegia coerulea
  Intron number 1 from transcript AcoGoldSmith_v1.002385m (l ocus AcoGoldSmith_v1.002385m.g) derived from phytozome v7. 0 (chr-ID scaffold_13; pos 3121503 to 3122757 reverse stra nd)
tccccgcaattgagctcctgaaggataataatcaggtgtgcaatgttatcacccatatctatgttatttagacgacttcccaacattaattatcttcttagagtatgattacagatttgggatcgtcaacattgattctctttgttgagttagagtttgagttcaattctgttatgagtaggttgattatgaatgtcattgtacacacatgtaaaatagactagaatcttactactatactgtattggtgtaacaaacatttagcattctagaatttgagctactgttgacatgcatcgctatctgtagatcatattgtcatgttgttttcagtattgcttaaccacacaagtatcttgtttaaaacaaacatctgtgactcagctctccaaaagtgctttattgcaaaacctgaacatacattacccatggacctaacccaatgtttgatgtcagtaactcagtatatttttggtttatcagtttatggtatgtagtattaaggtgaaacagataaatgtccacaagagctgtagtttgcttcataccgttttccagttttccgtacatgtacatgtacttgttattgtttatgccaactagagggttattgggttaatgtcttgaattcttaatgatctaaaaattccatggatcaatcctaaaattgagataactgataagcaatctgcaagcagttgagttaagtcagttcattaacattgtgattatgctaattttgagataacttataagcaatcttcatctcgacattctaatggacttgacaggaacttttgattgttaaaccttggagtaacatctacagattcatcccctcttgttatccagctattgaactgcatccattctggttcgtatccaattttttttttttctaaatgatgaatggatataaattgaaaactgtcttgtttctcttgtcacagttgcgcttttaacaagtaaaagtggactcctgcttggtttgatttttgcatttgaaaaatatctcatgatcttagctgattttcagcagagaaaacataaatatataccaactaaataaggaaaatatcttttgttatgattattctcagaaatttattctgcatcatttcctcagaaatctgcattaattacgaataggataataagctattgctactaaattacccgttcttcctaacattgacagtgtttctctttgtgggagacagatcctcgttgtggctttcataggcccatagctaac

SEQ ID NO: 14598 - DNA, 3360 bp, Aquilegia coerulea
  Intron number 1 from transcript AcoGoldSmith_v1.000078m (l ocus AcoGoldSmith_v1.000078m.g) derived from phytozome v7. 0 (chr-ID scaffold_87; pos 34745 to 38104 reverse strand)
gactacttcttcagttgcttgcagctcgtcgccaggtatgttactgagttcctattctgtatatatatatatttccggtttctgctaaaatttgttagtaggtatgcaactttaatttcattattatcttcctctatcttgttttcctttattgagtcggaatttgccattgcacattccttttgccttaactacaaactgaaagttttcttcctcttttcttttgccgagttagtgtgctttttgccttgttattcaagaaatgtctgtgttaattgattatgcaagttaaattcatacacattgggtgcttggctgaagaggataaaaaggtcattcggatggggttagaatggatgttaaggatttatgtaacattgcctattaaagtaggttgtaatggacatttgttgagtccacttcgcctgatttgcagatatcttgtttgagcaaagcttgtattttacttttgcaagattagaactcacaaccggtgaatgcttcctttttggtgctcgctaaaacataagttttggttatatgcacagtatgggatacaaagacaagtgtgagagagaagttaaatagagagaaaagaaaagttccagaccagaatgtgaccttaaacccatgaagctcgcttgaagatccttcacctgtaaggaattcccattccaaccgaatattagtctcatttttttctttttggttccttttattttcttaaaattggatagaaaataaatgcggttgttatatacatgaaagttttgtacttaaatcagctttctggattgagtttcccccaaatacgttatctgcttcttattttctaatcatccatgctcttgccttaggtcatttccttaaatcttttcctttttggtccctaaatttgtggtactagcattcttatagaagttatggtatgaagtatcttcactgtcttaggtatgcttggatagtatgcatccatccacactgagttgttaccataaaaccatctttactattttggagatctacggcctatatcaataaaaagtaatatgggtcatctgaaggatctgggttcaatcatggaaataatattttgtttgtagttggttttttctcattggtgggatttatcacaagcaaaagttacaagcagtcacaaagtgggctgagatatccccaccaacggataatacaggtgaatgggtgatattacaaaacaatgacatgctcaaattccaattgcattgtgtctatttggtagttgtgctgcatgggtacagttacagaagtctgacgtggctagggagtgtctaacacagctaacttttcaaaaatctcatttgaggtcacatgtagataaaaatagcacaagtggttaatatgtcaaagatgctttggtaaggcagcttagtttattagaatacacctgtattaatatcctgctcaacaccaaggagttattagcttaaactggcaaagtcaagaaattcttttcttcattctcttcatcttctcggattgagaacctaatatttgctgctgaagtcttgcactacctccacaaatccatcatgtaaagcttcaaattgcttgaagttatcacagaagttcatttatcttatcaaagtttacttcaaacaatgtttgactagtaaagagctatgtactccaggaaagagctttgttcgaagagctatattcacatattgatggttagttcttgtttactgtgacaaatccttaattttgttgaaatggcatgataataggagcaacggtattaagaaattgataaacagtgtctatttatgttcttgtgtagagccttggcatgggtcaatgaaaactggacaccattttgaggggtcatctttgtatatgacacccaggaatatttaaatgggaagttagactagctcctgagcttattctttctttagggggaagttgtaaaacaatgcgtattggttttagctgttttgtgttcattgaaattggtggttcatgacttcacggtttatcttttctctagccatttatgttgtcgcggcaatgcagcgtcattgttttatttttgtttttttttgtttgagaggtgatttcttataatttcgttcattctgttttccttaaacttttatttatgcgttctcttcgtacctcatcccttgcctttcgtgctattgatgtgcatgtatgtgtatgtgcaacagattgttgcttgttttttcttctcaagttataagtagtataatgcttttgaaaatgcttcctgcactaagaaactattgcgaatttccccccctcccccctttatctgtactattatataatgtttgttcttttaatttttaattttttttttcatttggttcttttaattttgtttttggttatatcttctcttgctttttaagaattatatttgtgttgagttgtgttagtataattgttctgtggtgccttgcttatcaccctgtcattcatcttccatttgcaatcttgtcaaatgtcaagtaattaattgtgaaggtcataaaagaaatttgaatagaagcaagttgctaatcatcaataatgtctataattattcatccatgccgataacaaatatcgatgagaggatgaaatcaaattttttaaaggcccctataccctgttgagttactgtttagttgcatttgggaaaggacaataaaacacattattttctgatacaatgattttcaaatgaatctttttgctgttgcttagtaacaccagtctcaattgctcacgaaggcaacaacagaacatagttaaaaagagacccgatgataatcaattttgtgaaattggttgaatgcaaaaataatgaagccccatttatattcagcgaaaatcttatttattttcgtcattaaattgaagatccaaactcagaaattataattccaaatttcataacagccttatattttgttaaccttacaaatccgtggagaaaaagggatgagaaatctaatttagaaatggttgaattgtaagtccaaattattatggcgtcaaaggtcctattaagtttttaattataacctgcttcagaaaacccatgagaaaatcgagcacctggattgctttagaacaatggataccaagcagggtataatattaagtctttctaaaatttaaaactacaaatgcattttatgaaaggatggcaagtcatattaggcctgatttcaaaattcaagttgtacttcatgtcattggattgtatttgtgcagcgctcttatcgtttgcacttatcagtcttggcatacttgtatttaatggctaatcacttatcttctaacgactttttgttttcacaggcatag

SEQ ID NO: 14599 - DNA, 4086 bp, Aquilegia coerulea
  Intron number 1 from transcript AcoGoldSmith_v1.010898m (l ocus AcoGoldSmith_v1.010242m.g) derived from phytozome v7. 0 (chr-ID scaffold_136; pos 75073 to 79158 reverse strand)
agtactctaacaacaggtctagtactcttaatttactttgcatcatatgtacaaatgttggtctgcttttttttttaatgttgagatcatgagcttatttgttagatcttaataataatatagtttttcatgatatttgcataagtttttgtaacaaagattcacccatgtatgagtttataatttatatatgttttagttctttgtttggttagattgatagatagatctgtttgtaatagatggaaatagaagtgttagtagggagttaggaaggtttctggtctgggaaatttaacatatctctctttgtttgctatttcttctctttccttcctttttttatattcttcataataccttcaacacttctttctctcacttgctttcttttagtactacttcaagttcatgtcacacactttagtttaagaaagcctgcaagaaagctgtcttgtggacttgtggttgtggttgtggtctctcaatacattagtctatattttttgccattttttttttttttttttgaaattttaataattaatgggaatatttaaaaacatatgtacaaggtttctaaccaatcaaatcatatattagggttcattttgaaagatgggtagttttttttgtttgtttttttttttccatttttggacgattttacccttttatgaagagacttctttgtttgttctcttgtggttaggtttgtatatgaagagacttctttgttaaaattttgttgtacataaatgttaaaatctctttgtctttgttacgaatctttggtcacgtcacacatgatttttccagttcttctctttctgacaacaatgttatcatcatttatgtactacttactctctctctctctctctctctctctctctctctctctctctctctctctctctctctctctctctctctctctctctctctctctttactttgggtgaaaaatcaagaacattgcttcaaatgaaaacagcatttttctctttagatctatggtagttggtgaaaaacaactttgggttttttgtcatttaagtgcaattaaactcaagtgtttgatacttagattcatcattcttagctttttaatcttttggttttttttttcataaacatgtaaaaagacaaacattggtcttttggggaggttgtttctactttctactgtctagagatctgtttgtgaagttttattaatggtttaagggtaccctagtatagggtgtttggttttgatttgaggacatttttgagaagattacaaagagagtgagagataatgcaaatggcaatagactactttagtgaaagtaactttatgtgttggattcatgttattggttccttttttacctctcactttctcttcataagctagatagccttctgatctctttctgaacaactgagaagctgaaggctgaacacagtttatacagaccatcatacaagagagagaaaaagatacatagagttttaaaccaataaaaagagagaaagaatgaaccaataagagaagagaatgactgttggacttggaagtaaacctacatctctctttagtacacttaagacaaaaacaaaacaaaatttagaaccaaagaacttagaatataattcatatggtgttgtttaacataaaaagaagctaagtaagtaagtatagatagagagagatagagtttaaattctgtaaagagaaagagaagaaggtacattaacagttctgcaaaccaataggaaagttgtacttttctttgagttctttcatttcatgtatgggggagtgtacaaaacttgatgtgatgacagaaaaaagtgacattaaagttctgatgaaatagcagaatagagatattttattaaaccaaggtggataatagagtgtatttagtgcaattaaccaatggataatttagggtatgtacacatgtcattcatatggaggtggaaatattcaaccaatcatattgtgggatcttgtgccagcttggcagtagggaaccaatcagttctctcgacgaaactaaggttacagaaggctttgggaaaggtggaaattttttttttttttttttttttttttttgtatatttaatacacattatagcacaacctgactactctctatcaagtcttttcaaatgttggtttttccttaaaacttattttttaaggttgcagtgtacattaaatcttgactaggtggtacatttcctatatgttacatcaactttatttttcaacatatattgaattatcatatattttggattttaataattactgtaaaatgttacattaatggtaatttgatatgcattatttttggttagttactgtagtctttgatgcattatagattcaactgtatatgaattgttaattttattacttgataagatgatggcatgatatgaaaataatgttagcgcgatgcaagattaatttaagcattatttataaatctgagggtactattactgatttactatataggttggtcaggtactcaggttcttccttgcactattgaattaataactttgattcttcaatgcaaaacctgaccttcaatccaatgtggagtttatgtaaagctataaaatcaattgggatgtggagaactaaaatcattttcttagaataattttgattgtcgattgattgactttgttgtgcactgatcattggctacatgcctagataagcatggtaattaagtagaaactaattaaacaagccaattgtttcatctgattttcattaatttcttgagtttagagcattgtgattgcatatgaattgatcaaatttcatatatttttaagccttcataggacttcaaaacacttgaaatcaattatttgcaaatctagcttttacttaagcatccaaattttaacacttggcgctcttacaaattacaatgcataaactcagtgttaatgtggtttctctgctttgtgtttaggtaattgaagtttggagatggttttctcttctgctataacatgaacattaaaggatcaactgaaaaccacagatcgcagagaggcaaattaataagaaagacgtaacaaacaactactatacagaacacatttaggactaaaggaagctcttggactatatgatccatgacaagtatccattaaaaatatcaataagtccttaaaaagctgaaaccatgcttgcaagattccgccatggagggaagtagtagtgggagaagatttgaatttatctttcgaaactgtattactaaggtttaacgttcgatgatcagtctggaaattcgtagactggcatacatagttgcatcgtcatgtatagaccaagagatgacagaatgtggtcatgtagtgatgagtataaggcacattaattgctttaagatcagtaattaaagactggccatacctgtagttccataggcaagttccagcttacgacatgattgttaacaagatgatcatatacatatgtggcctgcaaaggtgacaatgttggtacaccggcattcatagatcggatcagacttgagcttggtagaatacacggagagcaaccttttttagaataaattgtcgaacattgatctgtttagaattttgagagggttgagtaaatgtttctatatgggctaggcatagtgatgtatatacttgggtgaaagtcgaaagtatttgaaagattagggttttgaccaagagcctagtttcatagaaaaacaatattgaatatttctacacaaaatgaatacaatgtccttagaattgcactgtacaaactacctaactgcagttgccaatggcctttgccctcctatccattttttgtgatataaatttctaagcatatcacctaggtatgaggtgatatgctttgatactgttatgagttggactatttgacattattcctttctagtgtattggtttaagctcattaccttcttcattgaattgagatagaaggctatttataacatgtcctaacctaaatccttttcattttaatacagtgtcaaaaaaacaattgagaggtacaagaaggctt

SEQ ID NO: 14600 - DNA, 1121 bp, Aquilegia coerulea
  Intron number 12 from transcript AcoGoldSmith_v1.014192m ( locus AcoGoldSmith_v1.014192m.g) derived from phytozome v7 .0 (chr-ID scaffold_67; pos 98011 to 99131)
attactggtgcgcatcactgcttaagagctttttcctttttatttttcgatggaacccatttttgaactaattttcaaaaggtcatttctctttatctgttatggttcgataactcatatatgtttctaaaacctaatcaaaacaaattggagacttagagattgcttgcacatggtttcccttgtaagattcactcgcaaaacaaattagtaaattacaaggttcacttcttgtcatgagacacatttttacattcttccaacacttattggtcttccttctacatttttgcataacttcatcacagattctctgacagaaaatcaatctctaaaaccatacgtaaaatgcaagcaatttgtttctgctgcacaagtgcaagttacttcattaccacttgttcttttcccttcactatctaacatccaatgctctttcatataaagtgagttgaacatcgtctcaacctgttgtagctctaaaattgtgctttataagtgggtaaaatcttcgatcccatttgtttattagggggtaaaatcatttttatcgcttgatattgaaatgatctagcagaatgttaacttcttggtgggatagaaatgagtttccatgcctaagttttacaattgatttaagagaaaaaaaaatgtaggcacataaagcattttatattgtatgtgtttaaagctaatgatagttactggttaaatgaaatgtgttgttaaataactcacagctatctacacaagtcatttcagaaataattcacaattaagcttttatagctttctaattacttgccgagtagttgtctttcatttaaatgaagaaggcttctgaaatactataacgaacctgttttgtatatcatttgcacatccctgaagacggtgggtgttgggtggcactgccggcacatatatatggaacttattctgagttttctcacatcttgagactattgttgtagagactcatcttttttcacttttcattccaactgcacacctctcaatctaagcctctgttagttaatttccttgtgagaactctttagtttgtctgattaattttttttgcaggtgatcaactagcaattgcgaaggaaacagggaga

SEQ ID NO: 14601 - DNA, 1263 bp, Aquilegia coerulea
  Intron number 5 from transcript AcoGoldSmith_v1.008742m (l ocus AcoGoldSmith_v1.008742m.g) derived from phytozome v7. 0 (chr-ID scaffold_5; pos 291601 to 292863 reverse strand)
tggacttcagcgaccattattcaattcaagcaaaggtcagctattctaatatagtagcttgtatgaaagagtatgtgtgtctgtttctgtacaggtgcagcattttctgcatttaccacctggagcatataattttctaatatatataactcatttaaagttagtgtagaagagaacttcagactgcatacctgcagtaaatatgggcacctaagtcaatacaatattctgtgacagtacaattgaatcttcaaacattagatccctgacaatggggtctacgaagcccaattaaatttgaaaatagagttagatatactatcacaaggctgagacctttttcagaacttgatggcatacaagagttagctgatatgtttgaagagaaataggagcgtcgctcgactgcccgacaccagaagttgcccgagactcgcccgcggacaagttgagatttgttccagtttgccaaagtagcatcagggtccatttttctgtaggaaaacgggccaacgattaaaacacacgagaaagttcgtgtgctgttgcgtttttcggggttctgacatcgtttaggccttcaaaaagctaattttgttattttaggaaaggtttgtttcgtttatatctcttgatagagaacttcgttttccatgccgtctgtggcgttggattcctagagatgagtagagtccatatttgattataactcaaatctttctatttttggtaattttcgtcttatgttagggttggaggttagttgcgtcctttatagagtattagggtttggttaggatttggaaactgtagcccatattacggcctcttttagatgtaaaggacttggtttttattgattagtgaaaaagaagtgttcttcttaatattggtgtgagtttgtttgtgttccaagatctagttcctgcatcagaactagacgactgctcttgaatttggtccactattccgatcgtgatcttcctaccccgccccaataagttgtttagttcatgtaaatgatgggttcctttgacattgcacaagaagtctcttttgaataaacaaaaatggatggggtccaagcctggatttgtaaaccaatttcaaaggatttttatttttccaagacttgttgaggaaacaaactctaatacatatgtaaagtttacaatatgaattaagcaatagtagctggtacaacatgtacgattgtacgggaagtaagtctaacactgtctatttcttctttctttttctagg

SEQ ID NO: 14602 - DNA, 890 bp, Aquilegia coerulea
  Intron number 2 from transcript AcoGoldSmith_v1.008251m (l ocus AcoGoldSmith_v1.008251m.g) derived from phytozome v7. 0 (chr-ID scaffold_2; pos 2676525 to 2677414 reverse stran d)
gatttcttgcttctcgttgcttgccaactttgctggtaagcaataagctaactatttctgtcattgctgccagtttcctagttcacagttcacactatatttgctctaaagcttaccaacttttagtttcaacgttactcacatggctggtaaatctagtgattttcacacggttgtgtacttgcttttgttttaaaggaatgatattgttttccaaagtgaaactttggattagtactactagttaattaggatctattgttaaataattactacaataagagtgcacatttcttaaatagttcccaccagttatggtagttcgttttgtgtgtagagatttgcgctaatgaatagttgaataccacatggtgtggggaagaatatttcatgcctaagggctacaatcgaacttttcttcgcaaccagtattatggtatttatttgtgtagctttgatcaggcccacatataatgttggttgtgtgagttgtgacttgtgacatgcactatgcaataattttttgtcttgttttcgaggggcattctggaaaatgtaatatgctttgtattttaaaacacctttttttttttttgtctttctaagtgtattatttttggtagcaaaatatggagcctcgtataataacggtaaggccctcgataatttattatcaaacaaaatgtctttatgataaagttgatttgaaatatactaacagtaatatacgattgatgtttttgttttttgtacttgtactatgtaaacatatgtattatgtgacatcccccacatagaaacatgaaactttagttcatgcaagacttaataattagaagtcttaattatatgtatgatttctcattaacttatctgtcgacagcaatcaa

SEQ ID NO: 14603 - DNA, 1536 bp, Aquilegia coerulea
  Intron number 4 from transcript AcoGoldSmith_v1.011565m (l ocus AcoGoldSmith_v1.011565m.g) derived from phytozome v7. 0 (chr-ID scaffold_21; pos 3726629 to 3728164)
ttcggtatccaggaacacatcgatttggggattaagtaagtttgtgttcatttgctatgttgataaatttatgatgagttttatctgtttgtgttatatacttctgttacagaatgatttgatgtctgccacatttgtagctttcttaagtatctttgtgttctttgaattcatttgctatattgataagtttatgacgagtttatcatgtttgaagagtttgccttattgttgatataaattttaagttgccattttacttgttgtttctggtgaattaaattattatgtgaagaatgtcagaggatttttgtagtgcagctaacttatggaacagttcaacatgagttctggtcttttagattagtcatatactcatagcatgcttttcgttgtttaagttatttcttgaaaaccagcaaggaagcttcttgtttgaatcttgattcgttactaacgattcaggcaataataactacatgtaccttgcaatatatagtccagtatcactcgcctggatatgatctgctgattgtacgggcccttagaatctggcacatttttactcctggagcctttttatgtagttgtaggcttgtattgtctctgagtgaactttttgcttgaattaataaatgtgaagcaaacgcactctgtcccaagaccgattacgaatgttttgaggcaatttctacgtttgcaagagtaaatttgaaaaatcaattccttcttttcaacttacttgaccctgagatgctctcaaatcttatgggcacatagttggattacatcattgatattagctgtaatgtattttgattgccccaacaacacacatgaaaaaaacttaaccaatgtatttgttcactgctagaaccttttgcaataccgatgtgttatttattctgtgttttctgttattataaatcctctggtcataactgatgaatgagcaacaacgtacatgtgatgtgatccattcgccactcatgttgattaaatgaatttagaaatcttctagccctatgtttatggaacttgctaatgtaaacaatagtaaatctgaagaacgagcagctgtagctttccatctgttgccttcagtattgtacacgattatcttgaataagagagtgattatgtgattcacaattgcaattcaacgttcttttcgttattattcgatatctttttgtttgggagattttcgagtggttctgtatttagaaaagttagccgagtagctagtaattgatgtaatgcgttgcttttattgtgctggaaacatttttagatttggtggggctattgactataacttcagaagctatcaacagcttcactcatttacgtacattgaacaccatagaatgggaatacatacttttggtacttgactctgtctatgatttgatagttatgaaaacaatattttagggacattgaggattcttcatccttagttgaatgataggtgtacatgatgtatgtatgatttgctaattatttgtttattcatttctttttccaataggt

SEQ ID NO: 14604 - DNA, 3738 bp, Aquilegia coerulea
  Intron number 7 from transcript AcoGoldSmith_v1.003536m (l ocus AcoGoldSmith_v1.003536m.g) derived from phytozome v7. 0 (chr-ID scaffold_1; pos 4453771 to 4457508)
gtggctaggtaagccttttatgttaggagcctggtctatttgtctaactcatgcagatctgctttggttttgtttttgttattttattttggataaactggattttgattgcaaataaaaaggatgccaaacaaacagggtgaaagagaaattcccccagtcccttaacagaaattagactacaatgaaactaatgatgaatcaaagagttccagctggtcatgagatcctgaaatctattatcagttttgccctttacatcagtagtcccaataccacaggttgccttcaccaatgtgattagataatccaaagtagctgctctccctttgaagatgaaggaattcctttctttccatgcaaagaattccaaaaggtaataggttccacatcattgcacccagggagccattgttgcacgaggggccattgctagcttatatcggtcaaataagaatcatggattcctctcggctgtccatttattactcattcaggatactcgatacaaattatctatcccgaggagtgtctccagtatttttccccgacctatggttcttttcaattggtgacctagtgagtatcttcttcactgatttgccagtcagcaaatgcctgatcttgcctttgcagggccatgtcagatgaatccaaaggtcttcagcaaaggaacactggagaaggaggtggtcaatatttcctgggagggaattgcagaggcaacctgtagcattaatgtccattccaatttattatgcttgtcggcagtttacagactttgccaagcaatacaacatatgaaaaattaatacttagatggtagggtgcactttccgtagccgtttgcatagctttggggttttgccagtatttccagcagtgagctgcttataaaaggatttcacagtaacagagaaagtcttactccgtttccataccatagaattagtgtcaatggaatccatagatgaatagtagacgtccagcagtagggatatgttgatggcttcccccaattcccattctctgtggcctttattcagatgtaggttccaaccaccctggccagcatggtagctccaacgactagtaacatttacatccttgtttcctgcaactctcagtagttgaaggaacctttccttgagagacatattttctacccaaatgtcatgccaaattaagattttatgccaagtttaaagtttgaaagttaatcctttcatgaaatcagtctccagctgctgaatgcctttccatagactcgtgcagtgaggtctggatactggcataggcaactagccgtgctccttagccttacctgggtatttagctgcaatggtgtgtttcaagagtgtgtctttgttttcagcatattgccacagcccacagacacttggcaagcaatgctctgttggtctccatgatgcttgattacatataatgtgattggacttgcagtctttaaaccatctgacaagatgtattttgattacatataatgtgatcattaattttgtttacatacaagacaaaataaagcatagggtaacagaacaattaagatactcgtatctatgttcgtccaaaaaaattgaaaatgaaagagtcatatttgaatctctgtgattgggtccatgcaggtatcacaaatttctcttttcggtgtccctacaagtatcatatctgggaatcaaattatggcttgtaatatcggtttgacatgaaatagagacaaaatatatccatggaaatcattttcatgagttatgaaatattattggtaggtgtcaatggaaactagcgcgattatgttcttgagtcttgacgaatcaaaccacagatttaaatatcaaggatgtgctcgataaacttattatactttcacgttgtgaacttaaaaaggttgtgggcataaaatagtggaataatttttgaaagctatttctttttaggctatattcttgttagaactaagatgggtatgtagggggatttagagataccccccaaaaaaatatgaactctttgagataccccccagatttaaaaaccattagagataccccccattttttcatttggagccggtcaaccaagccattgacctatatttgaccagtctttatatcacttagactaaaatacccttccttgattttaatggtgatcctagtcagctacacactcaccaattatgccatatcaacaaaaacacttcatttcaccaaatcttaaacttttcttagagatatcccccaaaattaaacttttctttgagatacccccaaaattgcagaaaaagacatgagtgaaagattttagtttaaagttcttcgccttttcttctagatctgttaatggagttattttctggatctctgataatggctggagaagaaagaagaagcaaagaaagaagaacaagggttggagaagaaagaagaagaggggttggagaagaaggaagaacatataagatgggttggagaagaaggatgaagaagaatgggtggagattgatgggttggagaagaaggaagaagaaaaatgggtggagattgatgggttggagaagaaggaagaagaaaaatgggtggagattgatgggttggtgaagaaggaagaagaagaatgggtggagattgatgggttggagaagaaggaagaagaaaaatgggtggagattgatgggttggagaagaaggaagaagaaaaatgggtggagattgatgggttggagaagaaggaagaagaaaagatgggtggagattgatgggttggagaagaatgggtggagattgatggctaattatttgtaaccattggattagatctggggaaatatttgatgacgtggtagaaatgcatgctgactgggttggatgattaagacagagcttgagttaggataagggtatttcagacaatatgaaatcaagttaggtcaatggcttggttgatcggctccgaatgaaaaaatggggggtatctctaatggtttttaaatctggggggtatctcaaagagttcatattttttgggggggtatctctaaatcccccttatttatttgtttgctcagaaagcaataggaatttatcgaataggaacaaaaattatgaacaagtaagagcctataatagacagatccatcaagggaattaaaaaattacaacagcagtatattatttatcctatgtcaggtcatgcaatgtgaaatttttaactaaatctttaggtcataaaatgtgaaagctttaactaaaccgtattaggatgtcgaagctaatctgaaaaattcatgtttaattaaataagttaggctttgttagaagtatctttactactttatagatggcgcccccaaatcgagattgcttatgaggctcttgctggcagtatattgaatcgacacgtatttttatataaaaatatatttatatatttaggttagatacagatacagtagtttagatacagatatagatagtcaaatatacagatagtatttcggctgaattctttttttttttaagtttatttaccctattaaaaaccccaggcccaggcccatgtctatattattctatctttaatagcacgcaagagcgtgcacattcacatagttgagtttaagttgttatagacttataggtaatgaatgtagaatatccaattttatttaaatatttgctccttacagtttgttttacactttcactcttattagtg

SEQ ID NO: 14605 - DNA, 3785 bp, Aquilegia coerulea
  Intron number 2 from transcript AcoGoldSmith_v1.005331m (l ocus AcoGoldSmith_v1.002303m.g) derived from phytozome v7. 0 (chr-ID scaffold_19; pos 1174275 to 1178059)
ttcttggagaagaattgcaaagtaaatccattcaggttgtcgaatctattcggtaaatttttttacttaaaatacaaagttaactcatgtccattcatatgttcaaattaacgaaacatttccatcaaaagtacttttgtttgggggttgtaataaatggtatattattacaactattttctaatgctaccactcacacccataaacaagtgaagtctcactaaatcacaaaccatattgtataacctgtagtaatatttcattctgtgtcatatcataataaacaatctcgactctgtaggcagtaggcaggtagatacctcgtttcgaaaaggatttatgaaagaattgcttgttttgtttggttatatgaactcctctagaaaaaggttggaaaactgtagtaatagaagaggggaagaaaacgtccaatctgcaacgctagtcaggtaaaaaaaacctttttatcttatctacttactgaatgatgttctgatttaagagcataaataaaatgacaatctgaggtccaaactgatttaggttcaatattttttagggaccaacattttcatttaaatctgttttttggatttttttttcttgttaaaagttccatatagatctaaaaactgaaacagaagtacagaacctttttagtatcttttaaaaggtttctagcgaacgtctagactctaaagaatatttcctatgtcttattgaagacaggatttcaaaagaaagggttacttatagtatcatcatgaaatatataactaataagaactttccatctatcacagggtaataggttataaacagttagaataaggtttcctttgatggtgacctcttcctcgacgaaacaaaagagtgtagtttcagtatgctgtactgaatgtaatatttatcactggcttgtttgttcaaaccttctaatgggcatacccaaaactagctagaagcgctactcggattgtgcagtacatggaatgggaaactctggaaatgtattatttgttaaactccagcttccaaccacatattcattacacaaaaatctcttcttccatccaaggttcatataaaaataaccattgggtgactgtctcaaaacttttgtttgagctattatattttatagttggagatagggagttacattaggctcagtgaattaggaatttgccttcaaacttacctttgtcagcatgaccttcctatcggtaaagacaatgttaaacctccgttctctatagaatgaatatatataaccaatatatgttttctttaaacaagctacatgtgaaattctttgatggagagaagtagacattcctacgttatggaaaacgaagagcctgtctctgcattgacttcaatatcctcttaattgaggaagggatggaaatccattgattgagaaccctagttttggttctatattaaggatgacaggattgcttgtgaacattcagaaaataggggcttgaagaatctgtaggaactaggaagtattcacaaaaaagtaatagaccatagagatgggttaattacttaagcttaatgttttttttaaacaaaaacagagaacaatgaagaaaaaaaaaaaaaaaaaaaccttgggtcagctttgactgatgcccccctccctctcttttttccctttgttgttatcatgtcaaacacataccgttttacttgttggttctttattctgattatcaaaatcataaattgatattgtaggaagctttgaaatcgtgttttgtggtgaatgctcctttactctatagagcagcttcccgagttcctttctcagttctcaaatatgctatgacccttgatggtatgttttgtaaaagaataacctttattttaatttatattttataaatacaccaatttgtgataatgaagagacactaaacatattacagaaacacttgattatccctttgacttaagagatccacaggtgtcgtattactttttactgaatcttatgcccataacttaatacaactgtaatgtccattgcaataaaagtcctattcagctaaaaaaaaagataactcaatactttagtaagccaaatacagacaataccttggtgctaattttgatgaaatccactatttctccttgtactaaaagtttttcctcggtcttattcttttcaaagtacccgctatatcaactttgacaaacactgcttattagcattctacactcatgaaattttgtcagtgatccgtccaaacgaagtaccctttcttttatgcgtgcaacaggatatgtttggctgattttcaatcttttttagataatgaatagtaatacacaatctttttaacatttagacacacctttcctttctttgctgtcaattcattacaacagacttgtgcaaaattatatggataaagcatcaatgaaaatatgtctggagggacaaatgaagttgtaccataacttgcactagtttccggagagacaaattaagaaccaataaacgtattattcgaagctttcatttcttaattgcaggaaaaattgctgctagtagtggacatgcatcatggataagtagcaaacagtccagaaaccgggtatttgaattgcgaggaagaagtgatgctgttgttgtaggaggaaacactgtccgtcgtgatagtatgcatcttcatttacttaagattcttttgataaattggtagcttagtctggtagttcttatttgatcattcatattcaatctcttaattctagatccacgactaacggcacgacatggagcgggccatatgcctgtacggattgttatgtcacaagctcttaatcttcctgaggttgcaaacctttgggatgtctcagaggcacgcactatagttgtgacacagagaggtgctaggaagagtttccagaaactccttgcatctaaaggagttgaagtggtggagttcgacattctaaaccctagagatgtcatggaatattgttatgatcgtggatatctttcaatattgtgggagtgtggagggacattaactgcacctgctatatcatctggtgtaatacaccaggtattgtttctgtaaatgtcttccaagtatcttttatgtagatctagataccattctgcagaatgtcacttctttagtaaacttatggtacagtatattcttactgatataagggcaatttcaattttccatggtacttttaaaatgatataaaagacatgacaacaatggaatcttttctaggatatgtgtatccatgagtttctattcaagctctagcattctgtgataaaccttgctcagtagcgttatattcttgatgtgcaacaggcaaaatcccgacacattctttaagatatggtcttttattctcaaatgttgtaatgtagttgtcattcaatcataggctacatatagtccttttgttccttaaatgtagttgcaaaagtttcgttttctctatagccacggaattgattgcagtgcagttcaaaatttagatagaacttgagcagttgagcatatagcagactgaaataagtaatacacccaatgattagcttcatgattaatgtcttcttgtatagatcaacgccaagatgtggtatgtatgattgtgaaaacgttgtaaaattcacttactaaatgttgaaatgtgatgtactaactaaattttagatggtgattgtatggcttacattaataagttacatgccttgtgcaggtttttgcatttgttgctcctaaaattataggtgg

SEQ ID NO: 14606 - DNA, 1263 bp, Aquilegia coerulea
  Intron number 1 from transcript AcoGoldSmith_v1.006303m (l ocus AcoGoldSmith_v1.006286m.g) derived from phytozome v7. 0 (chr-ID scaffold_55; pos 491636 to 492898 reverse strand )
tatatctttctctctgttcaagttattgttttaaggtaaatggtttatgattgaagaagtttatttcagattgaatggtttgtgattttgttgtttttaagtgttttaagtaatgggtttttgttattttagtgttatgattcttgggttttttttatttttttgaaattcttgttaattttagctttgatgacttgttctgtttttttcaaagtgatggatttttttttttttttttcaagatttagtagtttattttgctatttgtttgttaaatgaacagataaaaaaagtgttgaaaatggagcaaaaaattaattttaaaattattgattttgtttatatttgttgatttaagataaactaattaaagaaaattagaagaatggcctttgaatggttttgaagttttaaggagttatgcaaagggttttttcaatagctttgaggtttagataattgataaagagaacacccctgctttctataagagaatgataatgagttacttagaaaccattgaaaaagcttgaatgtgtggtgggataatggtgttggttgactgttaggtcgccttctttgatccattattaggtgtggatttatcttttgttcaattttgatgaagaggtgcaattttaaatttaaatttgtttgctcgtaaagaattatgtttgagtaatgttggagttttgtccattgtactcgctctttcgttcctattgaataatgttgattacctgttggcaatggcaggaaagagataaccatttcttttctgacatgtgcttcaatggagttccaactttgttcaatcatttgcctaaagaaagaggaatgcttgaagcattaggtacttttgaccttcattgactaatttttagaacatcttacaactgtattttcactgacatcaagctttgccttatttgcatcacatcgtcagtcaattctttcttgaaagtgatgcatttcaacaagtaaatgcaaggatgtaaggggacattaattttacgtgttaactgctcaggctccgtttattacctttttgtgggggggaggggaacatatttttgttgaactggtgattgtattagaaaattttaagaaccgacaaaagctatttctctatcgaatttgttttcaatctcgaaccttttctatagactattctactgctattatgtgctgctattgttaggcttatattatgatataatctttgcagaagtcaagctaaactttcttcaagcataagctggc

SEQ ID NO: 14607 - DNA, 1497 bp, Aquilegia coerulea
  Intron number 3 from transcript AcoGoldSmith_v1.010515m (l ocus AcoGoldSmith_v1.010515m.g) derived from phytozome v7. 0 (chr-ID scaffold_38; pos 1131429 to 1132925)
gaagttgcaggaaccacggcattacgagtgagtttctctttcattcttttgtactcttcctatgtttaaatcctctgtaacctctccgtttgctgagcgctgaattacaattgcatcaatccatcaacctgttgagactcattaactgccgaaaatacaaattaagacaaggtttactgggtaaaattgctagcactgataaaatttcggtattttcattgtacctctaaatttctaatcatatattttggtcttcccttgactggtgttgacaattgacagttaactgctcgtcacatgtccaacaagttcccttgatacatgaacacaagtaaaataaataaatataggacaaccttattacaaaataaccttctctttcattgagttttagcgaggaaagcagaagttagtattcatgttttatttctcaaatgattcttaagtatttaatcgatgggtgttattgatttggatttaagtaaatatacaataccccttatatatatccctgtaataattaagcatttgatgcagttcaaaacaatagcacaactatgaatagaataggtgtgaagtgtaataataagaacaaaaagggtatattacatgtgaaggaagtggttctttaagtttatcaaatctcttcggagtaggagagagtctgtgtggggagtgtttttctttttgtggaagaagggtttctggttctctctgtgaagagcattttatgatgaaagacaaatatttcatttgaagtatgtatagtcataagacatgattaacagatgattagtagttaattggctttgactgtcaagaccagctaaacgggaagcctggaacatttaatgtgagtggcgatctttaatgtgcccttttaaattttatttaatgttttattctttcaaaatcagagtgcaatttcatacattaggattttccaatggtaagaccaaatatcctttgctcttttcgaaaatttgctattactagcgatccctttgacaaatctttggtgtagtgttaatgaatattaggtctttagtgggtcaagaacatcatttgatgatctatttggctggtcaccaatttcaataggattgagaatttcggttaacaataaggaattggtattcttttgagtatgtactgcacataacctttttaactgcagtgagccaatttattggtttatttttcctcacagtaccgtaaacatgttatttcccatgtaatctcaggacgtgctccacattttgaaccaaataatcaggctttatgaccacacacgcttcgactccacattcaaccattttaactgcccccctaatgatcaaattatacttaataacttgagtacttgattggagacttctttattttaacctgtcttctgatgaccctttatgagtttatgacctcctttctctacttgggccattaattattttgtttgcagttgcggcaagccaaggcagaggttgtatcggcaag

SEQ ID NO: 14608 - DNA, 1226 bp, Aquilegia coerulea
  Intron number 1 from transcript AcoGoldSmith_v1.019474m (l ocus AcoGoldSmith_v1.019474m.g) derived from phytozome v7. 0 (chr-ID scaffold_16; pos 3260715 to 3261940 reverse stra nd)
aaggaagaggtaaaaatattttttatattgcacttattgtttatcagatttatttaactgaatatgtggcattgctgcttaaaagaaagaaatataggtaccatattcttatgaagaagataagctcaacattccatctgtttccatggctctctcaattaacattcgagggatggaaaaaccatagtctctaaaatgtggggaaatttcccagcacgcactttataaagtcaaaatcctatgaaattaatttgttacctgaggttagattctcagaatgcagaatgtccctttatataagaaataataacaaaatatacggagttttcttccactctaccaatctgctatacaaaaaaaaaaaaaaaaaaaaattgccccatcatattctttgctattatccattatcctcaaggcgacacaccacactcagagatgatagtactatattacactcccatttgagaccttgaaatccgaacctggaggctacacctttctgccgctctttgtgactttttagcattgccacagccattttcttttgaaagttgaaacagtatatacagagtgagacttgtataaacggttttacccttgttttccgcaagtgaattttgtcccaattctgcggctcgaatgataatccattgtgaacccccttatccttcaaataaaattttctaataaatgcatctaggattggtcacacccagtagtcactgagaggtctggaggattactgacaatgacttattacctggtataaattgtccaattgtggattttctggttgttgctaaagtcttgcacctttttttcttgagctcattatgactacatgaaagcagcagctaaattagattcttagaggtcctctatgtgtgctctagggagggagatgttttttctagaagagtgggaagtgtagaagttgagcgttaaggtgatgcatttgccccagctgtgagacccattcatccttgtctctgccactgctgggaaaaaacataatctccttgcttcagttggtatattatgtagtgtcgtaaccaaagacatattcttgtagaaattgtatatataatatggttttttggacatgtggaagttttcttaagaacatgtcctgtctttttcttcttcttcttccttttttggcagaatgtttatcaatcttattgcttaacttgtaggcaaaactgaaaaggagacttactgcaaag

SEQ ID NO: 14609 - DNA, 845 bp, Aquilegia coerulea
  Intron number 8 from transcript AcoGoldSmith_v1.006049m (l ocus AcoGoldSmith_v1.006049m.g) derived from phytozome v7. 0 (chr-ID scaffold_27; pos 996894 to 997738 reverse strand )
ccagggtaaatctatttgcctcatcttattgaattgtcatctatacagaatacaaagtttgaggtaaagctaggcataggtaattgccctatatgttatttattttctaccaagtcaagtagccaaaataaagtcaccttgcttaattcagcataacgcagagtcattgataactcttttatcaagatgattgaagaaacaagagtggcgtttaagtataccctaaaactatatgtctataacctgatagtaatatacataggtatcggaaaatggatgcagctagcgtttaagtataccctaaagctagtgtttatgttactttactcatgttatgctataatatattgagttaaacatctgaaactggggaattattagatttctctgatagctggttcaacaatagttcaatggagattccttctgcagaacatctccacttagcacaacatcaacctgtcaaggaaaacctcagggagaactgaaaacttttgttgtgatccagtgtctcaacaccttagcttgttttatccatgaacttcccggaaatctaaaatccgattaaaactgactgagacattgaatcttgtttctgtagctagtttagttcaagaaacaaagaataatgttaaactttcccagtttttaaatatgaaagaagaaaagtagaaaacaaactatagaaagttttccgcaaagtaattcaggcaggtcagtgttgacaaacagattaaaattatgtgtacaataagcctaaaatctattatttctatttaagcgtactaatttctgtgatgtttcatgcagctttagtactgcccagaaactagacaaacttggaa

SEQ ID NO: 14610 - DNA, 1767 bp, Aquilegia coerulea
  Intron number 2 from transcript AcoGoldSmith_v1.022659m (l ocus AcoGoldSmith_v1.022659m.g) derived from phytozome v7. 0 (chr-ID scaffold_21; pos 3268015 to 3269781 reverse stra nd)
cgacttgccggagattttcattgagacaagtaagtacaatagtttaatatatacatggaatttgtattttaattaaaatgttaagtagtttaaatatgtttttctgggtcatgtcatgtcattattggcttcaatcattcaacaatacgaacaacggtttaagtcaactttgatggaaaattgcaaataaaatcctccatgtcttatggagtttacatagagtatcaagatcatactaataagatttttctattgaagcttttaccttattttccttctaactttagattttcagtaattttcaatgcataattaacaagataagaaagaattttttggtgaaaattgttttaaatacttgattaattacatattgggttggtgggtagatcataatctgtcatactcccaaagtcccaagtattctattcatggctaatgagtgggtcagtgttacacattacataaaggtcaaaagaatatgaaaaaatagaccttcactgcttcaaaagattttataattagtagaaagttgaatctcaattctattgtcttcttgtcttatatgtcccagaaattattattgacaaataaaactgcttgtttgtctagcaatttgtttgtgtaagtaagacttattaggaataaggatgtaaatgctttcacaacttataatagaatgattccttagtaggtttcaactttcaactgtgtagggtagtgtgtataaatttagaaccactgaaccaggaaggttatttaatgttggtgtggggagattactcctatttatgatcatggggatggttagtttgtaggcagtattagatcagtgatgcccattcactcaatatgttaagcgatgaatccaacatggacaactgtgtcctatgtggacttctctgtctttttgaactgagctccgttggcgttgcaccaggggaactcaaccttgattttattgcattcgcttacaaacaacatttacctctcaaccaatgtaacatcacgaattttggattatgggttgatccaaattgaatgactttcgtagctagccacactaattaataattgagcaggatgaaattaaagaattaagatacaaacaaaagaaaacttatattattcgaatcctatccaaaaattaaaatgcaataaagatttaaaacccaagttacggaaagttaaaatgtaatttgttttggactttccttctttcttggaatagaatagttagtagtgaagaagaatgagatttgagctgaaggtgaactattctgagttcttcatcttgtagaaatacttggtatcatatcctaagtcttaccgtctttagtttcattcactggtggtctgtgctgtgttcaggaagtcgttctcaatgaatgaattgggccatactgtctttactttcacagacccaaatcctcattttttgtagcaccgtgtgttctgaaacatcccatgtcaccttcttgtatattctaacaagtacggtgtgtgtattgacatgcaaaaagaccaagtataatatcctgagatatccttctctgcagtttgttgacaaattaatgttctaattaatagacagaatttctatatgaaaacgaagcacatttataacctaagattattcaaactaagtcaaatgatctcaaaaatatgtagtcttaaactcctaaagagagttattttcttgccttgtttacagttgacaatattactaataataatagagctataattgtgtataggtgccaccat

SEQ ID NO: 14611 - DNA, 2983 bp, Aquilegia coerulea
  Intron number 1 from transcript AcoGoldSmith_v1.003108m (l ocus AcoGoldSmith_v1.003108m.g) derived from phytozome v7. 0 (chr-ID scaffold_26; pos 174636 to 177618)
cagcaacggaaggtacctgataatttttttcctcacatttattacttgcaatctaataaaaggaatttatttgattattcaagttcaatatttttatggttaaagtggattttctctcatgagatttattgctttaatttgtggttggattgttatgaagattttgtttgattctgattccccaccttctcttcctttgtttgtccttggtcccttttttcccttagtccttgacgaatggaagtagatggttcattgagaatcaatattattagtacttagtctgtttggctatcattttgagttggttgcttaagaaaattatagatgcctttatggaaaatgggttacaatcaccattgaacattattctaaggaaaaacaaacaccttcagattttactttgttttcctctttgagctgttgatatgttatttacgtgatttatgatggcgctagctgacagagtaccaaattagttaaataaaagaaggaatacccaacgggttgaatgactggttttgaaaagtataaggactaaggagtactacatgatgttttggcataattagctagatgcccgaataacgctgtagctagagtgtcagctgatgaaagtaagacaaatttgttttcggttagcaacaaggatctacatttattgcattattttctttaaagataggtgtttgcccatatttttttattagcttggtgttcctcaccattggttggactagtcactgcatacctaggctagagtcgcaaaccatgtggacttgaccattcaggaacaaaacccgcaacaattttgggctttttaacgttcccgtttgttaagttaaattgacccttaaatattagacatagcacgtggtgtatgcgaattattgtggataacatcccaactgataaattgttggtagcttaagtggctacagtctacatgtgcgaccatgtatatattaaacacttgttaactttagcgggtaacatgtctaacctatagaggataagatatttaatttatagtggataacatgtgtgacctacgtggattgttgatgtaacgcttagtggatataatttgtattatataggataacgtgtgtaacttatagtggataactagcgtaacttacactagattacgtatgacttagaattatatcgttacttgcaaatttgcaatgctttatttgtgtaacttcgtcttttattacataacattttgttgctctatgttcgccatgtggttattattcttagttgtcaagaaatcaggcatgctatattgtaatcagttatcaatgtgtatgtaaagagcacaaaccttaggtaaccaattgtttttaaaattctctttccatcataacattgcaaatgtggttgggaaatcattatgcacaattcatactttttaggtgcactaaataaggggaaacataaaaggaaaaaataaataaaattagcaggcgtagaacatccacattagaaagtagaaactgagtggtagaataatgtctttgcattatgtcaaaaaggttatgacgcagtgcagaatcgacgggtagtatttaaaagttttgtaccatttagaaataaactacgttaagtaggcattcattttcttgagccatgaagttcctcgtacgcatgagtcttgttcttcttctccctcttcttgtcctatttttcgctagccttaggcatggaaaactgcataataattgaagttaagtaggcattcgtgaccaaacagtaaccttcataccaaaatagtaaatggaatgctgcttttaacgtatctgatctactttctaaatcaatcaagtaagagcaagaaaagaaaattattcaagttttatttctggatatccttattagcatcaatcattaccctgtaatcttctgatcaaattgataaaaggaatgctttgtgagtttatactttatagtgatagaaaaaaacttagtcaaactaaaaaatgtcggtcagtcaatgtatacctatcaaactgactacatataatttattcttatcattgaactggtgtacctagtaatacaaaaagttaaactatatgtttaagttaatattttcagaatggtattaataagaatgaaattgaatgattttggtataaacccttgagcaggcatgttaaaagtattcttaaggagattcgaaatgtttgattgaacatcaatttggatgatggttctagttgcatcaaagtagtggctatagttcatcaatttttttactagtggttgtcttaaaatgtttttgcgagaccattcctactatatatatatatcttatagaaattttgcagtcctgcatgtagatttgacatagctgagattgatgattctctctttgttgcatcaaagactgcacggagcaactttgctcagtcctccacctgcaatgactagttcagggttctcgtccgcccgagatgaaatagaatttttttttagatatagctaggagtgtatttgaaaattattataccactggacgtctcatttgggttgatataaaaagttatgggtgcagtaaaaaactgggtgtttataactaatgacaccggtttcattagaccaatctgtatatgatcttcccagtgttcccaacggctcaagtgatagcaactgcttatggatttgaatgtaatagattttttttttcttaatttattttagtaacagcactaaaccttggctgttaataacaatagcaaaacttatagaaaggcacctagctgtgacatggtcatgatccttggagaatttacgtttcttttaatgtatgagaaagcatgttagtagtacaatctcacaaattgtacaccggatttttattttacaattcttgaaggccataccagctggacatccatagactttgttagactcatacaataattattgtgattgatgcaggcatctgcggaagtagattttttcaccgagt

SEQ ID NO: 14612 - DNA, 1469 bp, Aquilegia coerulea
  Intron number 1 from transcript AcoGoldSmith_v1.003030m (l ocus AcoGoldSmith_v1.003030m.g) derived from phytozome v7. 0 (chr-ID scaffold_49; pos 714497 to 715965 reverse strand )
cataacttggaagctcacttgcacttgctggacgggttagttcttaatcgacttcttgttttgctttctagtttccactacacagaagctcacttgcacttgctaacatctgcaagagcccacaacacaaaaatgcacctcaacaggtcattgttaacaaagaatgctgctactgtctatagatcctacataatttttgtggtgggacaagctatatatcactggctcagcagacttatctacaacaatcacataaacactcatccaaatccaataacttcagtatgtgttgtattattgctaattaaagggggtggggcactgctttaccaaaagagagaaaagatttgattggtacttgttatcttcccatccaacaaaaacaaactagaacgtcagcttcgtggtgcattattgatttattgtagaacacggtcatgcaataaaataaattatatatgccatgatgtatatacaaatatacaatatgctgaattaagagtgtttcttcttgcaatcatgacagcttgcattgagtgatccaagtatccaaccataagaccatctccgatggttcttctaaattttcctccaaatcttgttttttggagttggaaatggaggaaaatcggttttggtctccaaccgtttcctctatttttttccttcaaaatcaatgaaatagaggaacggttggagatggtttatcctccataatctttattttttttccatttttaccctccataaatatattatataattactatatatgaactttaaatttaattaaatatttacaaaaataatttaaacatttaaaatttatttaattaataaaaatatattatgtaattaatatatatggactttaaatttaattaaatatttaaataaattatttaaaacatttaaaataatttaattaaacatttaaattttatttaattaataaaatttatgttaaatattactcaattaatataaacatattatgtaattaatatatatgaattttaaatttaattaaacatttaaatgaataagggtagagtggtcttttatcacgtttaataattataacacactttatcacgctaaccaagagaaataatgattgggaccccaccaaaaattctccctctactctttctccaaaagccactattccctctacaagtagaggaaattgtagagaatagaagagaatcttatggaggtggaggaccattggagatcaaaatatatgaatagtaagtattttttagaggaatagaggaccattggagatggtctaacctttcgataaccttcaatctagtggatgttgatagatataagtatatataaactttagtagcgtagaaactgtacacaaagttaacttggtccttagcttgaaatatactgtttgttttatgagttattagacctctgaagtatttcttgtgaaacattgaacaggtatc

SEQ ID NO: 14613 - DNA, 1788 bp, Aquilegia coerulea
  Intron number 6 from transcript AcoGoldSmith_v1.026056m (l ocus AcoGoldSmith_v1.026056m.g) derived from phytozome v7. 0 (chr-ID scaffold_4; pos 5422408 to 5424195 reverse stran d)
ttactagtaagtagctatggtatttttgtttgatgatatgtctatcttcttaccaaaattttagcgtattaagtttgagggattgaggggtataccaaatagtacaggtttcctattagttcaatgatttggaaaaaaaccgatggtgcttctcacttgtatgtatttcttttgtttaacttcatcgacgtttttgtcagtaattagattgcggtgtttttagaacctccattttttttcctttttttattatttatctaattattttttatatcagaccgaagatgtttatgtagcctatgtcaagagaatactcaagttatttaaagagatgagtgcattacctaaatttgcccatcttaactgaactgcagatatctaggtttgtatatccatataatattatggattttcgatcttttatgaatatacatacgcacttaacattactgtacttgtgtagtataaatggtgatgttttgtaagctgtaaggtcattcaataatcgtggtagcgcatccacttaagctgacaatgttggtttgatatttctggaccatggccttgccggtcaccattttttacggtagtgatatattatgattgatccattgccctttcagtgatgcatcatgcatcaacgtgtgtatcgaatgaggattgacaagtagattgaactgatagttttacagagtagtggaaacaactgtttcctataattaagattagataatatgtttcaatgtagtgacctgaggttgtatatacctctttaagctctttgttgttacttaggtttgagattggaaaactaatgtacaggacagccttcaagatctttgtgtgcatcaaagttgttcctcaccatagatatgcgtcgattgagtgacaaaggaaacctttacctacagatcttttcaattggttttttatttctttgcttttttcgttgtaattcaggttttgatttagcatagttttggaatgttaatggcacactagaatatgcataagggggatacacaaattaaggagctctaaattccagaaaacggaaggttagacctttacagagagttggcgaattgaagtagtaggaaagtcgatgaaggactgggcagttaaattccaatttccttaaagctgattcattggcccttttacatgtgctttcaaaaactaatacacactaggagagaaaagccttgaatgctacgatgcggacatatgaactatcatttccattggtggcatacccatattttgaatatccaaacaattgcaaaagaaaaaaccattattactggaagtaccttgtgagttgctacatattgttgtttttagggaatgtttgataagctactagagtatgccaaattataatataaagcattgtctaatggcttatttgtgaaagtatgacaaatgaagtagtgaactgtctttttttggcctaattactggatgtcatcgagccaccttgtcatcatttgagccattagccaggtatttttgtagtttggaagtagtggagtgatatttttttagtgctcagtgattattttctgtcatacccattatcaggtcttcaatttcattatatggaattgctgggtcttaaatgtaggctttagcatatgtatcattgatcacatacgactggaaatcagggcttatagttggggacctaagtctatttgtttgtattattcttcaatagtccatctctcaatttgatttttgttgtctacagagtgctgattgcgtacgagaaagggttgattattc

SEQ ID NO: 14614 - DNA, 1308 bp, Aquilegia coerulea
  Intron number 9 from transcript AcoGoldSmith_v1.001194m (l ocus AcoGoldSmith_v1.001194m.g) derived from phytozome v7. 0 (chr-ID scaffold_9; pos 4722557 to 4723864 reverse stran d)
aggtcagtatctgattggattgagaagtgatgtttgccacatctgttttgtgtttgatttgttacttaaaactccactaaaagcatcttaactatatatttccataatgagattagaagtgccacttactgggtttaaacgagattataagctcaaaaagtgaaaaaagtttataacaactgaacaaacagggtaagcaagaaaatgtgttgttggcgtgtatatttcacacatgaattagaaaacaaatgatactgacttaaaaaacatacggaaagaagatttgtagcagtatgcagttaaaatgatggatccactgaaagtctgagatccatttagttagtgctttggtattaagtaacggcctttatcttgggtggcccatcagaatgaatcataacctcgacatacctgcaagtttctgtcactattactaaatccttgcaaccgttgggatatagtgtatgttttaatatgttctcatgaaattcaaaactatcaaattttaataaattcttagtagatggaattcttcatctgaggatatagtgccataccattcttgctatgcatcttcagatgtattggtaaagttggcagtcacccaagccttaaaacttaaaagtttacatgcatgtcaagcttatatccaaacaacgattttccacattggttgagctttggaggacagcttctcaatttcactttggaaaatcactcaagtttactttcagagaattatggtatctacatataggatacttgaaatcatgactgttacacagtatacgagctggaataacgaaatagctttttaggattagctttaaatgtgtgaattagagccataataagacatgtttgctatttgccataggctaacccaccttgacacctatactttgtgcattccctaagcaaccacgctcatggcgtgtgctcagtacgtgtacctgacccaagctaagaggtcactgccatgccgactgctgcatggacattcatgccttgtgaacggggttaccgacctcacttgcacagtggacaaatgctttcccccacaggaaaatttctacattcaccagataaattataaggtcgctggagattgatgcctcttctatgtttcttttcctctctatcattcgtgaagatcttttccctttcctcaaaaccccatttcttgccaatctgtccatttgattgtctccttcattttattactattttttattctttgcaaaaattgttttaattctgtttctaaagtttttggatattgtaatttgtagggtgcttcaacattgt

SEQ ID NO: 14615 - DNA, 703 bp, Aquilegia coerulea
  Intron number 7 from transcript AcoGoldSmith_v1.000285m (l ocus AcoGoldSmith_v1.000285m.g) derived from phytozome v7. 0 (chr-ID scaffold_3; pos 6007981 to 6008683 reverse stran d)
aaaagacgcgcccagctgagaaggtattatatgcaatatagtactggacttccaacatgaactagtgatttagttatatgtgtctgctctttatattaagaatgccgttatgtgtatgcttatgtatacgtcatcagttatatgtgtcatgacttgcataaacaatttcaatatatttctgcattacattacagtgatgtacttcattacattgagagacgtgcattataattataaatgatatcaactgggaacttttgaaagaaggccggcatagatattgtgtggcaacacaagtatcaccttttagcactctttcgatacccatcattaatacttgattgatgaactgctggaggttattattctgtagaagtgaaagcagtctgagtattagaaaatttgttcatttgttcaaattctgggaaaaagttcatattccccttttctatgagctgaattcactgtatactacaaaatcctgtttaacagtttgaagctgcatcatagtgaatcagcacttagatatttcctattttcaatttactcttcatgtattatttttgttattatattaatgaatatctttactgatcaaaagaaaagaaaaaacagtttgacgctgcacagtcataattctcatattcccactcataactggctctttctttccaggtggaagttgatctagcactctctgcac

SEQ ID NO: 14616 - DNA, 3716 bp, Aquilegia coerulea; identical to SEQ ID NO: 14326
  Intron number 1 from transcript AcoGoldSmith_v1.005658m (l ocus AcoGoldSmith_v1.005644m.g) derived from phytozome v7. 0 (chr-ID scaffold_35; pos 307479 to 311194 reverse strand )

SEQ ID NO: 14617 - DNA, 993 bp, Aquilegia coerulea
  Intron number 7 from transcript AcoGoldSmith_v1.006206m (l ocus AcoGoldSmith_v1.006206m.g) derived from phytozome v7. 0 (chr-ID scaffold_61; pos 97864 to 98856)
tccagaaggaatcgaaaaatttccctttgatccatgtaactatcttctttccatattctcattttttaatctctagtattgtgacatgatctgcatcagtcttacacctatttttgctggtggtggggccaaatttttaaatgatttgtctatatcagactagtttttggtttgccaatcaatcccgcattatccagaagtgacccatgttcataaatattaatatacttccgagttgtcaattgtcttttgtcatgtcatttcttttcacatgggtcacttctagtctcgtaggagtaaaaagttctttgaacatggttatcgtgaaaacttcactgataaagaaaagagccgctcataagctcttgaagaaaatataaaaaccaatatgtttggtgaggtttctcaagtaaaggtcagaatttatgaaattttcgtagttacaatggttttctatttttctagaaaggaatgctgagggtctacaatgattaatgtcttttgaagatgttcttgttatagagatacaaactctcaacatatcataaatcattaaaaaggctttgaataggttttaaattctcaactatatcgaaagtttgtaaagttagactcagtcagattttgtgatgataatgttggtctacatgatgacgaagccatcaccacgatgaccaaatcgtaatgccttaaatcaccccaacatttttacgaggcccacaaatcataggttgtgcataactcgtatcatactcatcgattaaaagtatttgtggctgaaattatcagaatcagatgattatctttatgaaacttgttcgccaaatcctcttttctgagttgggatgcaccctggatcaaacttttattacataggtttcatagttgcatacttatagtttgaagatctcattagtggaaaacttctgactaacccaatttattgtttgttgtgtagtggattttggtattcctcggtgtaccctcgaaagt

SEQ ID NO: 14618 - DNA, 3202 bp, Setaria italica
  Intron number 1 from transcript Si023888m (locus Si023888m .g) derived from phytozome v7.0 (chr-ID scaffold_3; pos 27 252669 to 27255870 reverse strand)
cgtcttttcgtcggagtcctcgagctctcctccaggtgaatgtttctagggtttggagattcctctcgatttcgagtttcccccgactttttcctgcgattcgattccagtagctgtggttagggtttgtgaagtgttggcgcatcgattggtggatgttttggtcactgatttcgatcccctcatctcaaaatatttcatttgttcatctcatttgcttcatttaaggtttgatatgttacattcggttcattccctcatgtataacttctgttatttgactagattttataggtggtaggtgttattgttgaatcgttatttttactgactaatttttagtttcaatcgatgattgcaattccctgcagttcgaatcgatttgtgtgttcgtctgtgatgcttcatccaggctgttctgatttgtgctaattagattagtaatgattcgtaggttgttttgctattgttgagtgaggggttgttctagtgaacgaaaattccaggctatagtgcttagagtttcactaatttatgtactagagtcgatttcttatttgctattatgttttggcaattaataggtcctcccctagtttatatctggacttttaggcactcataatcctgttagtagtgttgggttgggtaatttgatggtgaccccattcaactgactagttattctgcttcacatggcatatgtcattatttatattcccttctaagtccgtatgtatcaactacccattatcagatccctttctatgtagtttgttcaaatattggtgctgttaatttagatgattctcaaattgtattgaattattagttatatttcactccagtgcaggacaagttccaatctaaattcaaatatttattttctttttatcctgcacatattgtgtttgcctagatgattcccagttgtattgaataactagattatttcaccctagtgcagtataagttccaatatgattttaaatatgcattatctttttatcgttcacatattgtgtttgcctatttatagtgctggtatagtggaacctctcacatgaatctgtttgatccggtgtccttacaaacaatctgaacaattgattaattcgtacttgattcactgatatgtctatacctggttatgtgagggagctttggtggtatatccttttttgtatattctaacttcatgacagtacttgatgagattactattagtacaatacctaattgggcgtaagttatatgtgtctagtatgtaaattagtcctcatagtacaactcataatatttattttggcgtaatactttattttcttattgcttagaatataattatatacttttttttgcagttgaggtgtagttttattttgaatgcatgtcgttgtttccatggtactgacaagggtatgtaaaatacccttttcttgcaagtattgactagacagcctcttacaagtatagcctgcatgttatttccctttttttagcgaacaatctatatggcacttgagcgttttgaggcttctcagcgttcgatttgtttttgccgttcgatctgccatctgttccgtcttctgccctccgatatacttggtgttggtttgttttttttttcctgacatatttggcttgttatagagactattttggatttttgcgaaccatgcctcttttttagctggaggtattgatttgaaccatctttttgctgacgattcgaaccccgagtgaggaatttcgccccccctgttcttactgttcattttagcgtctaggttccaattcgataggcggtgcttctcttatgattcaagcttttgcggatgtatagttgggcatttgaatgtatttgttgtttcattgtggggtgtgataatttaggttaatgattataatctagtggaatcctcgcctcttaattgacttagttgttcaacacattcacttcatgtaggtattgatttttagacgcagacctcttcctgattcagctgtctctaaattagatttccgcttctagatttttcgactcttctctggttttatctgaataagtagacatatatacaatattctgaaaagaaaagatattttcttaatgtatacagatttttgactatgtaatgatacatatgagtatcttgggtattttgttagccctagttaaatagttgttgccctaaagctgtatctcttactctattcgctttgtttcctattaagttaacttacatgatgtcattattcttattacagtagcttattaagtgtaagttttgcattacaacaatgtaaattagtatgggctgccatattgcatattttagtagcatgtttgccacttctatatttataagtgaattcatcctttttttgcagcctacatgatttttatgaattccattacattgttatgttgcaatttgtccttgatcccagtaattaagtagaacaagaaatttgtacatctgcattttatttaacatttatttatttgagggtttttcactcatcacacaatgaaattggttcatttgcaattcgtagggaaaaaatattcgtaagctgtttgatttgttaatatctagggttttcactcaccaccaaagatttaatatgtttatctggataacatagtaaaatatctgattcatttgttacatttgtttatatctgtgggttttcactcaccaacaaatgttattctgttcatttggaaaccatagtacaatatctgattcatttgttccttttgcttatatctggaggattgcactcgctaccaaaatttaatctgttcatttggaaaccagtaaaatatctgattcatttgttctatttgttaatatctgggggtttcactcattggaatttaatctgtacttatggaatccttagtaaaatatttgagtttttgagttttcatctgcttatatctgtttgttattttgtccatctgtacacatttctttttatctgcacatgttctaataatgctaatctatatttatttttagacacgtaaacttggtgaaaaggctttcgtagagacatgattctcatgactggtgacaattatacctatcttggtattggtgaaggcagtcaaggattctctggttttggcttgatcacatactgatgaaaacaagactaaattcatgacaactgtccgtgctttaagaag

SEQ ID NO: 14619 - DNA, 2574 bp, Setaria italica
  Intron number 2 from transcript Si003480m (locus Si003480m .g) derived from phytozome v7.0 (chr-ID scaffold_5; pos 18 144060 to 18146633)
cgtcgactcctcctgctggagctcgctctctcaaggtaacccttgttctagctgctaccatttcaggggatagtaccatgttgtcgagccttcttggatctgttgtcgattgctgcattctctacaacaatttcgtgtgattgtgcatttttgagattttggggttagcaggttgatgattgctgcacgctctgcaacagtttcgtgtcaatgtggatattgtggttttggggtttcggttcgattgaaggggaaaaaatggcctaaagctgacctaatttaacacaactatgcattctcgagaaatgctgtaacatttttccagcatggctacatcatcacttctcgaatcaatttcaaagtggaccaagtaattcacgagctgagctcattacacagtacttactttgtttgtactgctggtacaccatataaaccaagatgaacaggatagttggtaaggagggcatctttgaatagtggtctgtcctgagaaactccttttaacctttttttattatactgaaatacacgttaatgttccttcctctttttggtttattaacaattacttttatgagtcaattgtgaccatggaactgtaaggtagtcttgaagtgccttggttcattagtgtccaattgtccttccacaaatttagttttacatcgatgtccatttgtccgttatattagcagtaagctagtaggtttttttttcccttcgttccatgatcttagggagcctttttggcctaaaattattgacctatttcaaactctggatgatctggatgtgtatggttatgaaagaagttgtcttagctggccctacatcagagtcatcattgaataatttgcttttttttgtttgagatcatgtttgtggtagccattgccttattagtgtgtgttgattccgacttattggctctcagtgcaaaacggcacgttaaatttggaaacttgtgaacttccatacccgccaaaaaaaagaacatccatagtagtttaggaaacttttgtttcttgaacaatgtaacaaaatttgatccagaaggatctttattgtgatgaatagtgaatttgttcaacatgcctttcagagttccactagtgtgaagaacttaaaatgctagcagttcatagcaaaactagttccgaaccttgtattgtttcattttatatttgcttgatgcttgtcttgcttgttactataattcatactgtatgattcattggggtctttttaattcaagtaaaaagtttggttggcatgcctgttgcaatggcatcacggcagcatccaagtggtaactacaaagaatacaatctttctaggattagtcattgcaatcatgttgattgatctcctgcttccattagttgctcgctttatttgtaaaattttaataagatctgattttatctatatagacttgcaatttacatgtggacaatgggattgtggtcctgtagactccttggaataaaagtgatacaaatgtcatcctggttaggcagcaagatatagtgcttccaaaacatagtcccataaataataggagaggagttttagttttgctgcctgaggtgctattgttcttaacctctcaatgcattttgtgttttacaatatagcaattttacatgtagatactatgatggtagctctgtagattcatctggacatatgtaaaacattttttttccttcaggcagcatttttttgaagcagtcatagtagtactgttaaaacattgtccccataaataactggaggttaggtggtgtccctctttgtttctcagtaatctgtatcatatgctgctgctttcagaggtgcatttgtctttaacaagatgggctaatctagatttggctgttatcttagaattgaatttggcattcttatgattctttaaatagttgagtgatatgctgttatcgaaaaacttgtttatcgaaaaacttgtttgtgaactttttttttcatcagatgttttcagcaacacatatttctttcacatagttgtgctggctgctcagccgcgaaatactgaatcaatcagttttaactaccaggtcttactactatgagatccttcacgcttgttgattaaattaagctaatgaagaaaattagttctctattctttttctattgaaaaaagatggggtttctatattttaactgtggttattataggtttaaacaagcgcatctgatcatggctaggagctgagcagcagagaagtgaggacactgagttaaaaaaaaaagtgcattttttttgcagatatttgtagacatgtaacaatgtactttgatggttgctctatgcgtgtactcatgtcaacagaatggagcatgcaaaatggttccttgtgacttgcttggctcttatttccagtttgatcatgatccatgccaaaaccttgtactataataatgaaaatacttcaaattttcttttaggtgtgcaaaattactccatttgaagtaatggcagcatatggtattaacatcttatattcgagacctgacttgctcttatatttggtgatataggat

SEQ ID NO: 14620 - DNA, 1203 bp, Setaria italica
  Intron number 1 from transcript Si027983m (locus Si027983m .g) derived from phytozome v7.0 (chr-ID scaffold_8; pos 32 675991 to 32677193 reverse strand)
tcgtggcccctgtgattgctcatctgtgccttgatgtgcctcttcgctttgccagacgtctttctgtaaatcagaagcaatctttgccaaggatttgatctattaacgaggtcacatgggcagttttttcacaagtaaactttgatgtgatcaattcaagattctttgtagtgttacctaatgcgacaagtttagaggtgtcagggttctggatgatggtataccttgtatgtctttgtagttattttttcagtggcttggatgtccagtacgagaacctcaagcttactgaaatcatatatgaagacaatgaagtccccaacggttggagcttatgactcacatttcagtgaagctgccaaacaacggcataaaactcaccaaagttgattaatgctatcattactctagtccttgtatgtgtcttgccaccttcttgttcatctgaaatttgtgggcatgtttctatgcagccttcaggtgtacttaaagtggaaagcatatactttcgactcgtttctagtagacaatgtaaatatttttctctataaactatggaaccaaataccgatgctctgttttcttcacttgtgatcttgctgaaggttactcaagaaaatatcttctttgagtcctatgaacttatattttactagaggctttgatgctgtctgaaatttgcatatttgtctcttttttacagtaaggtaatgcaaaggtttagagggggtgaatcctcgcaagagctaaatgcttactttaggagctcaatattttctgagtgcttttgcttgaacacatttgtcagcatctgtttgttccctgttttggttgtggttctcaagaggtcagaccatttcatgtccaggactccatgtacctttggcaggaggaacaaggtaccagaaagtgttatcttgtttagtatataagaaagtgtgtttacccagccaagaaacaccaggagtttacgtattttaaaccttagctagaattgctctttgtctacgaattacggcttaaactgctgagtagtgatggtttatggcagaagttgcttctgagaaaatatcttagggcaaaacccctctgtcaattgaattggctgtgaattttgcatacttgggaggtgggatttcaataaatgagatgtcatgccttgcccaaggctttgattcatcgagggggtagcagaatcgctat

SEQ ID NO: 14621 - DNA, 587 bp, Setaria italica
  Intron number 3 from transcript Si039638m (locus Si039638m .g) derived from phytozome v7.0 (chr-ID scaffold_9; pos 18 57581 to 1858167)
gaacttgagaagcagggcatcactttgcccgagaggttactttctactatattctttgctattcatgtgcatcatattttgtactgttgagttgagagtataattacaatatatgaactatgaaaaaactctatgcagctggaaaacattttcatgtagattttgcagtgttttttttactgtacttcaggatattggagcagcagtttatccttaagaagagaacttacctgtgaagttgtgatagaatgcagaaatatgtaactgcctatgtgatctatggtcaggatagatgcagcttctaaattctgaatttgttgaattctacaaagttgctgttatattatgttggtagttctttagactttgagttggccctgagtagctctttgagtttgtttgtaatgctattaactcaagacaaaaaatagagaagatatgatatcattttattatgaatgctattgccactgtagtctttcaatcaagccatatagacttctttatcaagaaggtagtacatgtctgaaatgaatgacccgtttccacaaaactgaacctagattgatgtttcaggttcacagaag

SEQ ID NO: 14622 - DNA, 1737 bp, Setaria italica
  Intron number 2 from transcript Si026659m (locus Si026659m .g) derived from phytozome v7.0 (chr-ID scaffold_8; pos 32 878238 to 32879974)
accgcgactgcctcgaccactggagggcggtgaaggtgagcgccgctccccttctcctccgcgatgctcagggtttgggtggaaatcgggcaaaatgggcattttccgtggttagctaatttagtggcttccaagtgcagcaattgattgaattgcaggatgaatccggcgaaggttgaaactgttactccgtttgtttgatcctgtgaatgtgcggaggatttatcttcttgatgtgtgcttagatgtgatagcttgtcattgtggtttgctgttgtttaggatttgggtgagccagcatcccttgtagatattgtcgattcttttgatctcattctttgcgttgagctgcagtggtgtttttgtgttatgagaagggtgatgaaggttgctgctgtggtattttttcacggaagctttaccttcttgaggtggttctgtgtatggaatatagatatgattgtcaaaataattgtttttatgtagtagtgagtcatgagacattagttgctacctagtctgagatgacagatacagacttttaattcctctacatttttgtctatcggatacattggattaggtatcgacttccttttcatgccatttttcaatctgtttctatgtttggttaatgccacattgtgtttaatccatataacagtgaaatgggatcgtctcatgtttacaaagcttcacttgttctgttcagatcaaaataactaggtatagcttttaacaaggtgcattgtatgtttccataattttcatttttattagccctaagaaatgtaactaaatttgactgtgccctagtcagtttgatagattggtaacataattttgattgctaattgtgttttatgcattaggttctttttcctacaaatatcttgaaatattcgtttatctgacaaattctagcagttggatctatgtttgatgtaagttttgattgtataaatataaattccaaacttttacaaataacaataatctgacaaaaagctttctcaatctggctttctatatccttgttcattgttgactagaaatttatggcctgccatttacatacaccgtatggaacaaagttcttgctcaatcagattaaagaaattttttgacatggcattacttgagttgaccaaaaagggtagttttgtaaagtttgtcaatttctgtgttttgtgaagacttttcctgctggatttttgctttcagaaaagttgtttgattgagtagtaacagttaggtcagttttctcgtttctttagcttataatttactcttcatctgaaaattccaaatgtgggtgtcatagtggttagacaggggttcacaggtcaaaatctggtagttagtattgcgaatcctgcttctgttaggatgttggaatgtctacatccatttggaagttgtgctggtaggtaactgcatatggagtctcagatggggttgtaagttgaacttggatgattcaggttatgctaagattatgttacttatgacaaatgtagacggtttgcattagaaaggacacaccttttttattctgcaaagccaaccttgaacatgtgaaatcttttgtgcaatgaaaattaaatattatatcttttcctggagctttcttctgcaattgaattgttgattttctttcaaattggtaacttaccatgctttgatgcttcttcctacacaggagggatttgcattttctcattgcaccacctgcaa

SEQ ID NO: 14623 - DNA, 1431 bp, Setaria italica
  Intron number 2 from transcript Si034163m (locus Si034163m .g) derived from phytozome v7.0 (chr-ID scaffold_9; pos 41 402307 to 41403737)
ttcggcaacgtggtaagtacagtatattatcggtatatacgagacttgcttgttcttctaagaaattcaaattctgtcctgaaaaataattcatattttaagatgtacagtaatgtgtagtttttatcttttttttaattcaagttggtacggattcgcgtgtattccttctttgtgattcgaaatatttcgtcgtgtattcgtagttggtatttgggcctagatttagctgcccctatgggccgaagcaaggaaataagcccattccttgccgcttccatcttttttttgcctctgctttctcctcccgtccgctaggtgtcgctgaggcttgcaatgcgagccgccggctgcaacgcggcgccagcgactactcacgctggtggagcggccctcagtctcgtccatggacgctgaatttcagcgtggcgtggacggcgatgctgcgccgcgccgtgaattgggggcacgagacttctcggggcccggcgccggttggtacgatactctctgctttcgtcagggctgattgcacttgtaactcggggatcagatccatttttgggtcccaactcccaagtattcttcaagttagaatttccatttagaatcgtgtacactctacgaatattctgctgaaacataaataagtattgagtgccatattgatttgaagcctaaattttcaatgaattatttgatttcatattcgggatttggttttactctaaattatattatgatcttagacatgaggtcagcttcaaagtttaatctcattttctaactcatactttaattcttataatcaaactgaatgttggtttggaatttctgttttattgtatcaagttgccaatctgagctgggttattgtcttcaatcaaaccacaatttcagttcaaactttgaaaccgcatagaatttcagcaatttggaacatttagggtagacaattagaatttcactttgagtctttaattgaaattatttcattcagcaaaggccttcagatattctaaaattttcaaacaaaccctattctgtgtattctaaaatgttcattttgaggaatgcaatactgttattttaagtgtcttccaaaatgcttcgtaagaccccatgttgcattgcatataacgaaaatgctctaaaagtttcttggtatcagaagctgtgtaatgaaaatgatcctgtgaccatgaccaagtgagtattggtgctggatatatttcataaaacagtgcgaaaatagcaattatcttgaaagatgatatttggtgtctgttgagaaactttgtctttacagattagttcgttttctttttgcttcatatgtttgctgaaatacttcataagctatgtgaagaaagatgatattcccagtcgcgttgatttcattgtttataaggtatatgattttgtcaggtt

SEQ ID NO: 14624 - DNA, 1568 bp, Setaria italica
  Intron number 2 from transcript Si036250m (locus Si036004m .g) derived from phytozome v7.0 (chr-ID scaffold_9; pos 53 822721 to 53824288)
agatccagccgcgcgtggtctccttcgaggagcaggtagggcaccttggtttccttctttgaatgctgcttttaaattcccagataatactattagcttctatacgttgttctgatcatattgtcctgcaattggttcgctgaactcatttggaatgctatgttactataatggtatggaaatttgagtaatgttagtaaagggttagtgaaacaattgaagacacttatttctgtatggtcagttcatagtttataatttacccaaaatgaagatatggcaaattttagggctagtggggagctctcaaatttgtcagtctgtcctgcaattttttgtagtttggtatctcggttaggtacagatagagagctctatgacctggtgtatcttctgtgaataatttgtcagtctgtcctgcgattttttgtagtttggtatctcagttaggtacagatagagagctctatgacctggtgtatcttctgtgaatatattcatatttattgatctagtaaaaaaactcgaccatgggaggagactccccctgggctttgttctaagagggtgctgtgcttcaaacctgggttgggatgggagtttcaatgactcccggagttcaacactctaaccgtccaccgtgagaagcttggcatttattgatccagtaaacaatgaatttataggatacagatagtggatgtacggtaaattgcggtgttgcatttgatttggaaagttggggactttgtttttgtgtggcttttttttccactttctgcatttttattgttgcatatcttgttttctcattcttcataaccatgtcttttaatagctatggtaatactataaaggagattggtactgccacgtgattcatgatacatgttcttgaattcttgtgcattcatatggaaatatatgcatcagtagattacctctatggtgttactgttacattgctctacttgagggagttgtaatttatactttatgtggaatggcatgatgtgtgtgaagctgcttaaccataaaggcttcgtgttgtcttgataaaagcaaaaaaagaaagagaaaggaacaatagctattacctcagtggcactttagtttgttcaccatgtttcatctataaattggactgaagacttttggtgaagtagtgtttacttggcatgtctagatatatgcgattgcaatgatagaagccaaaaggtgttcacatgtaaagaataatttaggctttgaacttgtaaccattagctttgttcgatgttaaagttagctcggaaaaaaaacataacgaattcggtctagaattgtagtaacattaatacactgaaattctccagtgattttatgttactgtactacgatttttatgcgtgtctacaatcactcataatatttgtttcaacgagtttgcggtctgtgaaataattttcggttcactctattcattttttggtaagttgtagagatttgttataacaaactctatatctaatttggctgattattcatccacaggttgtagtgattagagagaagcttgcagaactata

SEQ ID NO: 14625 - DNA, 1346 bp, Setaria italica
  Intron number 11 from transcript Si029524m (locus Si029524 m.g) derived from phytozome v7.0 (chr-ID scaffold_2; pos 1 0604460 to 10605805)
tcaagaaaaaggtttgtacttagcttggatttatcatttgaagttatcttaagttatcttttgttcacagtccatattagtccatgtctgattgtttaggtatggatatctagcaatgtcagtacagaaagaaatacatttgaaaatacacatactcattgagtacattctcaagaaaccactttgatttgtccgtagcatactaaccaaggaagtattagttccaagaaaaaaatcaatgtgaagtggccattactaaataaatgatacaatcatattgatccttcaaagcatttaactagggttagggggtggacacattgcaataactacactattgatattctcaatggacagacattgtgttgatattctcgatggacagacattgaatccagatcctacatgttttgacatggagtacacaactgatctagttttctgtcatggcaaatagctttacccagtaagtggcatttatagatgcagaaaaatggcaggagacatcaagctctatgaagtgctataaatcctatgaaattcaagcgtataagtaaacaaatctcgaaaaagaatttaagattgagccatgttctttgatgtgaaaaaaatgctgaactgtacataatcagttttgctatacatttcaagtttttgccaatcaatatgtcagctacatatattaatgaagtaattaagtacttgatccatcatgcaaaatcctggtatattttgtctgaaatgacacgagggctgagtttccaacaatcatggtgtatagaaactacagttttgtgatattatatgtagcaaacatatttttcctttgcttccatcttttctggacatgaaaacatactagaaagagccaaagaggtggcaatgcatgtggccaatttctggttctgagggcccgggagtcaggagggagtgattgacctttttcaatttgagccacctagccacttccacagtacagcttaaacaaaccgtgtggggtggagtactaggttattggggatgacttgagtactagtttgagtttccaaaactccaaaagagttaatagtttctaatggtttcgaactaaatgctttcttatatccaaacactttcagtcagtcaaaataaagtctctttttctaactctagtattgacttaaagcgcaaaaaaattgtgtaggaaaacttttaaatcctgagaatactattcggttctttgttatttaaggcccaactcacgacatgagaacagaatgaacattaaagtagtttgcatgagggtgatttatgataaatgaccttgagtttgtctgctatcattcttttgcaggaatccaaattat

SEQ ID NO: 14626 - DNA, 1310 bp, Setaria italica
  Intron number 1 from transcript Si020904m (locus Si020904m .g) derived from phytozome v7.0 (chr-ID scaffold_20; pos 5 1610 to 52919)
acatatcgtctctcagatcgggaggcgaaaccaaggtgactgacctcatcccctttctcctccctccgtctctggttgctatagctttgtcatccatgcgctgtccttatagctgattagtatttttactagtggagttcgagtcgttttggttccattcagtagtgcttgtgttgattggattgaatcggaggattcgaagtggtttgtgctgctcgaatcgtaagtttgttgggctaatctcgatggaatttatgtcaattcgttggtttagtggtccttggcagttctctctgtgataggcccgtccgatctgtagagatgcggtggaatcctggtttactcaaaacggttctagattcctctgttcttcccttattttttgtttcgattacttagtttgcacgttaggggcctatgaagtttatgtgctcggatcctttagtgaaactgatctgtttacttagatgtgctcggatccttcagtgaaactgatctgtttactcagatctgctggtagctaacaggttcagggtagttatgttgatggtctagttttggtagtttcattgtcgatttctgtccatttttgtgatgttctgtccataaaaatactatctgtgcttcttcatatcttgtaatatgaattcatttgacaaactatgcatttcttttagagtgtttgtctaaattaatcttctggtgtttccctatgccagtctgttaatatgtctgtattatagtgttttgtttgaagtggtaatgtacatggtgcaccctgcagtttttcatgtctaatattggatctccttgtttgctgtatgtattaaggattagtttcacttctaatagcttactgctgatgctttcttgtttgtgtaatatgctgtgtaatcatgttgaccctgaggtttgtaagaattcctcttatttgattattgcatggattagtgtcctgaaggatgtggctcctttgtacaattaagataattcacttttttttttctcaacttttatatgcttactagcccattaggttgtgtaaacattagagtgctttagcctggtaaagatgagttaagcattttaaataaatttttggatttggttgatatcatccttaacacctgcatttaaacaatttgtctcttttgatcctgactattacagtgggtgttactttctttagtcattctgtggtatcaaagtttctggtgtagttgtgtaattatggttttggttggattcttactagtattttctacctttaaacagcaggaaattatatacatatttgtagtgtgatcttc

SEQ ID NO: 14627 - DNA, 1548 bp, Setaria italica
  Intron number 12 from transcript Si022431m (locus Si022431 m.g) derived from phytozome v7.0 (chr-ID scaffold_3; pos 2 745246 to 2746793 reverse strand)
ctactatattgaacaggtgtaatcctgtgctccttgttgtctaatgattgtatgaatatattttatttaatttcaacgcactttccttcaagttcataagtagtcttgcttgtgtatcctgttttctcttcgcagcaaggctttgcaattgattggttgtggcaatcttgtatgggttcttgaacttaaggtggcaaaatttttttttggacctaaaactgcgggggagttccctgcagcatgatcttctttgcactaaataaaagaaaagaaaacaacatcgagagaagctacttagccaattactaagcaaatgtttatctgaaggttttgctctacattccgagcaaattcaactttgaattctctcttccatctagttatagaaaggatacccccgttgaaaattttgctatttctatgacaccagatggatcagaaagccacagcaagtatctctctgcaaaccatatttctaaatctttgcctttaatgaacataccaagagtatggctagtaggtcgtggctgggttgtttttgccatgacattttttcctagctgtggcgtagtgtgagtggagtatgttggggaggtttcggcctctcctgttgcctttgaacattttgtacgacttcctttcttaatgaaatgacacgcagttctcctgcattgttcgagaaaaaaatgaacataacaagaattggtaggttaaggttcaactgaatgtccaccaattgccaggaccactggctaaatgaacaatgaagaaagaagttgaggtgatagaaattggaatgctgcatctttttaaccacagaataagatattcattgggatgtccagaaggaatccttatgtaagatttgtcctaccactaaggcttgatctctgaactgtgaggtcatgtcttaattttgtagcttgcataaaactgatgccaaatgcatgataaattttagttcacagttttgctcgaacgatccaatgattggtcctaatctgtttatttttactcaactactcatcggtccagttatacaggcaaggtaatattcaatcattgttactctgtacatgcctatcaaaaagtgataacaaataagtatggtcttagatatcttgatcctagtttctttcgtgttgcaactttcacctgtaggtatcattcgagtgctgtataattacagtagctacatgattaactccagtgatgatctggttttggtaatactatgggctgtataggaataagattcaccctgcatgggtcaaattggttgatatgtctattcgagaaaatttgattgatatgtcaaatctggttactgtggatgttctgttcagttagtgggaggctattcctgctgctggctactttattctgcataaaaattgccaattattcaatcttttccccttatgattctgtggaccctctgcaattgtcttattgatttggaaagattaattcttgtaaagaaactgatttatgaatttttggaatcttgcaggtttgtatccttcataagtcctgcactcctgtttg

SEQ ID NO: 14628 - DNA, 1381 bp, Setaria italica
  Intron number 1 from transcript Si004644m (locus Si004644m .g) derived from phytozome v7.0 (chr-ID scaffold_5; pos 36 692824 to 36694204 reverse strand)
ccctcgaggtggaaggcgagctgccgctctggctggtgggtacccacttagccacttcattcgtttgttttaactactactaaattgcatagcaccatcgccatgccatgcatgctgtctttgatctggcttttgattttggaaaaaaagggtgatctggcttttgtgctctaactagctccttttcatgattcttgaaccgaccgtaacctctacatttttataacatttttcgagtgttctaagccaaggttagccatgcttttttccttggcgagaatctgaatcttttccgttactttgattccaagactgcccactccatgtacctacagaatgacactttttttcagatcatctccaatatatataggcaaaggcaagcatatcttcctctactaagaaaagaatgaagaacataaaaaagagggagtcggcataagtacttttagaccagcagctcatatactactactgtggaacaaaatcttttgaattaacctaaccattttcatcgtacaagcatctggctagctaattagtgcaggcagcaccaaagtttattttgcacacagatcacggtaaactaaagcacatgtgttgagccaaaaagctagggtgtttttgggccagcggttggacacgtacgcacggacacgtaggaatagctatagtaatgtcatttttcattggatcagcagttggagaagcacttacccgcagatccattagctgcgatcatatcaacgaacgcgagggcgacactgacttaccctaggcgaggcctatcgaaaaggagatagatcggtggcatctcggcactcacgatgcttgcgggaaacacgacatatataccaagattctctgttgtttttactcatggcagcggcgacaatggcgtcgctgtcttgtgatgatcattgcagttttgttgctcccccctgcgactttgagaaaaaggctgcgtccacaacctggttgctgtcccctaaccacaactccacgagttgatgagagcacaccactgctcctcccaatttgattctcttccctacaactccatttgactctacgcgcgtgtgctattctgaaagtgacctgcagaaatgaaagccggtgtacgtacgtgcaatataatacggttcgttgcagatcacatattcgctaagatgctcactgagctgtgattattgtactgatggtcggtctaattgttcaataacgaccatgcgaccctctatgatgagctcatgatgttgagagtaacttatcttgttgttggtaaacatcgatggattttctgcgcccagctaatgaacggaaacctatacgcaacctgcttgcaggacggcacgtacctgaggaacggcccggggctgtg

SEQ ID NO: 14629 - DNA, 2550 bp, Setaria italica
  Intron number 2 from transcript Si014604m (locus Si014604m .g) derived from phytozome v7.0 (chr-ID scaffold_6; pos 23 908356 to 23910905)
aggtgtggatccccccgtgctctcctctctccaatccgtctttgtggatttatgaggtcaatgtcaggccaattaggctttgattgcaagtgtggatgaagtgaatgtgttggaatatcacctattgcagtgtgggttcagccctgccatcgatctctgtttagccataggtttgttctgaataaaatggtttaataagaaagattattttgcacaaccttggaaccacaaatgttacagaggcctcaaagcaatggctattgaactaagaaccacctatgctgctattatgcagatgcaagtatgaatttgttgactttaccaattattgtgtcactgatcaagcaatatttactactgctaatgaaactagaagttgtggttttagcttgatgcatggacttagctcttgttcatttaaattccttcagtgtaagttattagtgattctgtaaggatgtatcttgcaggttgtacagagatctcaagggaataaactttcatgggattttcataggtttatttttatgcctaagatgtcttgctgacaccatttgttaggactacttttttagtcactgtgcgctagggtactcaagggaattgttacgaatagtctccacggtattagtcctactgaactaatatccatgagtatatgtcacaagctcaccataataccacatccttttcctaatagttacagtgttttgcaactctaaatttggtgactgaattgttatcatcctctattgatgaatttgaattagtttatcactgatcaagcaaagaactcctccatccatcagggtaaggcgtattttgatttggaaaagtcaagctttgcaatttttgaccaacaattgtttaaattatgtttgcaattagtgtacaacaattgcatgaatagatttgcattcaaaggaatttaagatgatgttgcttttgtagcaattgagattttattgcaaaagaagtcaaatgtcaaaatctagttttgaagactctcataaaatacagcttatatgatttgactgagtgagtatacatttgttcaatgaaagaaactagcatgcaattgggtttagtagggattgatgtgccagtaggtgcggagatcttgagcgaatcatcacataggacttacaaatgttagggaggcatttttgttagtacattgactgaattctgcaggatgcagaaatctaacgagcaaagttcttatgataatatttcatcatattttgattggccctttgaaaacttaataaactgaactcaactgctctgcatacctatttatgtcttggttctgctgcttatctggtctttgtgcatttcctagaatgaatatagttgtaattttccaacattcctttttgtgaattagaatttgatatagtagggcctcttggaaagttctagtaatgttactaagaaacctgggtttgcaaataagtgctacaagatttgtaacgtttgtagtaatttgaatggttccagtttttctttgagctgtcgagcattagtagatacggtgcttgcaccttctcataaatgaaaatgagtgctatatgatttctaacttttgttgctatttaactttattccatcctttaagacatcaatctgttatgggtctagagggcctagccaggccggatgggccgcaggggctcagagtcggcccaaaggggggcgtgcggtactgtagcgtggcagctgccacgtgcctgcctaggttatggattaggaagagtctagagataggtttgcttgtaagtcaagtcattaggatgtcttgtgagtcaagtagggtcctccccataaatatgaggggagatgtaaccgttgggaatcaagtaaagaattaaggggtaaaaccctaaagctctccagctcttaggcttcggctccctctccctctctccctgcgcccccctcgcctccaccatggctgccagccacctccccctccctttagtgtgttaggatctgaactgtaactctcatcgagaggatggcactaggaagagttggggcaattttctgggttttctttccacaataccatgtccaaccaagggttggggatacatatttatagctggcctagcagccaaccagccaagcatcaaggcatatactagtctaagatgcctttttgatgctgtcctatctagtctaagatgcctaggactgtcctaccctaaaagtagtcaacaaagtggtgctgcagcaagcatatgctgcagccccactgtcctccatgtcctccagtcaaccagtacagcaactgaccagcagcaggactaggaccagcagcacagcagctgcagccccactactaggaccagcagcaagactaggaccagcagcaagacttatccagcatagtgccctaggtccaaggggtagcccaaaacccttacacaatcattactagatagtagattcgtttttcattccttgaaatgcaaatttgaactagtcatttcttccctctgatacaaaatttaacaatgtgtcaatttcattccactttgcaga

SEQ ID NO: 14630 - DNA, 2369 bp, Setaria italica
  Intron number 3 from transcript Si037870m (locus Si037870m .g) derived from phytozome v7.0 (chr-ID scaffold_9; pos 48 799627 to 48801995 reverse strand)
aacaacgtcggggtaagtttttcgtccctctccgacgtcctcccctttggtggtgttgttgagcatctcttgattcgtagaggtactgagatctcgcgtttgtgatccaacaagtagcgaaggaaatcgacgccatattgatcacaacctgtgcgcttgttgcgtctaggaagatctgatttgtgaatatttgaagcgattcttcttgtttgtgcaaaataggtcgcttgttagcctgttagggttgcttaattgtattgcttgcgatgattgtctttttgttctgtccgtttctgtagtgcagtccttcgccatcatgtatgtcgatgaggtggttgtctgatatgaagaaatccttgtgcaagttgtatttcattgtggattaatgaaattgatttgatgttgtagatattagtgcatgattagaattttgacttacgacaaaactaaaatggcctacatgttgggaggaagggagtatatgggactagcatggtagcacctctactggctgtttctttttgtttagtaggtagcataatttcgacagcctagtgttcgccatctgatattttgctgtttttttcctccgcattttacttcgcaagcacagcttcatatctgtactcatttgtttctcaacaatcatgtacatgctgataagtttcttagttttactaaggctcagtgaaacaaatgtctacaccaaattaaacacgataggatgcttccttttttcaaataactggatccgaaataagcataggaaagtagcattgttaatcatttacatctcgtgccaactgccaagcacatgaggctagcatttagaacacatagaacacaaaaggaatcaagcatctcttggattagttggtcatgtactgaattgtgttttcattgtgcctgatttcacatttctgtttagaattcattctgtagttatttgtgtgatgtatgatctaatgttttggtaagagaaccatagttactgcttgacattattattagtgaaaaatagcaaatatgttacatttttactatgaacatacatttcaaatcatgccaagccaaactgccttgcatgatacacaatcacaaatgcatgatgttgatgcaagagttgaattgttacttacacaatatactgtgcattgcaaagaatgttgccaactcatgagtatgcgatgatgtggcttaattaaaaggcttttttattatcaatatcaatatcaatattatatggtttaaattcttggcagtgttttttgtggtttacactgttacagcatttagagggcagatgggagaaaacatctctgaagattggtttgacatgtagagaattttgttgtcattgttcttgatcctttgttctgtagaaccttttagtacataatttccctgccaatccccatggattgggagggttccccttctatccaaaaggatagtatactggggagaaaaaatcaagaggaccagatcatgtgtgttacaattcttatttatgatgaatacacatttcatatcatgctgaaccaaactgcatcaccacattgcatgacacaggcgtagatcatgaatgcttgactctaattagaaagaaaggcagttgaattgttacttgctcaatgtagaatgcaataaaattgtagccaaacatggataaatattgatttgcaactcaacttatagcctttatctgcttgaatgatgaaatggaatgttgagcaaaatttttttaacaaaggttatatgaacttacattatacagcatttttataaagaaaaaactcattctgaacagcacttttgaataattcgggttggagttcgtttggagatggtatatggtgggcatactggttcatttttttgtttagctttgcctttgcttctgacctagcattaacaatcagatcaggagaacaatgcttttaatgatgttacatgaacagttaacctcaaaatggaacaaaccaggattcctgtcttgttcggagtcttttgatcgaatagacttttgacacgagtaatttcggttagtcttcttggatgtagctttgtatgtgttggcatgaaattttgtgttgggtttctgcacaatttattttgtgcaactagtaacatgttagcacaattacagttgatgaacctttcattgcaaccaataactggcaggctgcattgcttccgttcctacactttttcttctctgtttcgaaaccaagcttagcaccagaaactgagctttattttgttgcaactgcatataggaaagctttgtcgttgctcacttgttaatgctgttatactctgtgttgctcagctaatgattctttgtaatacgaacttgcagaaaaggt

SEQ ID NO: 14631 - DNA, 2601 bp, Setaria italica
  Intron number 4 from transcript Si030310m (locus Si030310m .g) derived from phytozome v7.0 (chr-ID scaffold_2; pos 25 537108 to 25539708 reverse strand)
agcacagacctctgaagcaaaccaaattgattacggtaagtttattactgtgagactgattcaactttttgtaattattatttggaaagggatggctatttagggagagcaatgatggggaacagtaaatgcatttgctggtgctgtatattgacatagcttcttcattttctgtgttaagggggatgtatgtgcagggaggggattgtggacttttgtttaggattagagggtctgataaaggagcagtagcacaattaaataagacaaaaaaagtaatgatgcttcaaagaaaagttacagactccaatctgtgatgtcagtaatggttttatggttgcaactagattctgctaccctgacaaaagctttcctgccaaacatatgtttccaaaaaatttcttcctccacggttttctagaatatttaagaattttccgcacttatatgattggcacttcatgagttccctcctgggccagttgtcattgacacagttagtcccacgtctcagtgggatggggtggcaaatgaaactgtcaatcttaagattgacaaattcttggatgccccggtttttcaggctctgatttgccttttctctgatgttctcctgcttaaacacaacaatgattcatgaagactttcgatgttagagattgcataatgaggttcaatttcctgtgcacggctagataattcccatctctgaaaagaatcctagccctttggaaatgagccttatggtacatggttgggaattttctttcctggtaagaaggatatccctacaaaatggaagcaaggatattcttatgtcctgtgtccatgttcccgtctggctgtggggatctgtgtgcaccgcaaccatggtagcaccaatgctcaatcccatcccacttctttgtcctcacgtcaagttcctgtgtccttgcctcactctgccagcccatcttgcccaattatccctgcaccccgctagttcaatagtggcaaccaaaagtgactccggcgtccactctccagcaacgtcaatccttgctgttcactgtcatcctcgccccatgactcctgccgcttccaccacctcatacaatactacaacggcccgcaatctactctaatcaactattgtagtttcttggttctggtgagtggtgattgctgcaaactttgtagaatcttttcgagtaatctatcatatggcccttgctcgatctgatgtctgtgtaagcctttgaggatatggatatcactgaacaaatgcttaaacttcatgatttatacatcttcatttgtcaaggaaccatcagttgctcaattttgtaattaacttttggcactttcctggaaatcttgcaattatttttgtagtgatatttttttaatattttgatcagctcagtagcttgccatttattttatatatgaccaaccaatgttttgcattatgatgttcctttttctgtacaatgcttttcattgatagaataaccgtttgccaaagagggactataaattattttaggttagatgttgtaagtttagaagccatgtttccttatctctgtttttattctgtgcatttaactaccttttctctttagcttaaattttcccagagtttatcctatttgtataatattcagcattaccatgctgtagagttttttttttccccagaactgcctcttcacctaaagaacatcttgtgaaatttcctttgtcttgtgaagtagctttacatgagaaagaatgccagtactttagtcattgaataggccgtaggttgttgcaagacttaaatgtggttttttctcaaacacgcaggagagctgtgtatcattatattaagaagaaaaaaaggggaagagcccttacagaacatgcacacacccaccctcaaagttttacaggaaaatagcgcgcctggtaaaacaaaaaaacgaccaacacttccagcacctaatccggtctaagggtgaggaggtaggaaatacctctggccccggccagaccccaaacatgtaattcctcaccagcaagcattagagctctagctaggttaggtgatacaccatcaaacacacacctatttcggtggttccataagatccatgcgcccagaataattagagaattgagacccttgtgtagttgttctcctgctcctgaaactgctctttcccaccaatcatcaaaggagacctccccaatctgcggagctaatgcctgctgtccgacagtttgcaaaagcttgaaccagaattctctagcaaatacacaccccaataggaggtggctaatggtttcatcttcttgatcacaatgaggacagcaatctgggtgacttaaatgtgttatgatgaaaatcacaacatgtgccaagtatgatttaattttagtaaatgacatttaatgtcagttttctataaatatagtttgagtttaaaattttaataatccccccctaaatccactttacgaacctgtttacgctgtattagatttagcctcatgcaaaaccttttgttagtatgttaaagagttatttctttttgttagttcctgaaagaatttttttttgtttcagacagagaa

SEQ ID NO: 14632 - DNA, 423 bp, Setaria italica
  Intron number 3 from transcript Si030176m (locus Si029445m .g) derived from phytozome v7.0 (chr-ID scaffold_2; pos 23 427861 to 23428283)
caaccgatcctgtcacagtgctatcaatattccaggtacctggttttgtgtttgtttgtcagtgttgaacttgtagtttgctgtcatcttcaaagctgttttatagaatgttttggccttttccttatgattttgttatggaattaatgcaaattttgtttcaccagaacagaggtcttctttagctgtaaagttattgtagatttcattagtatagtgaagttgtgctaagcagccattcttgcatgctccattaaaaagtccttagtctttcattaatcagattctgttgttccagtggtacccatgacccaaaattaatggaacattcttggagaaggcagcaaatgtctgattctgaggattccataaactgaccatacaaaactactgaatttgtttctgtgcaggaactgggctctg

SEQ ID NO: 14633 - DNA, 3597 bp, Setaria italica
  Intron number 1 from transcript Si028213m (locus Si028213m .g) derived from phytozome v7.0 (chr-ID scaffold_8; pos 27 008056 to 27011652)
cggctactacgagctcgtcgtcacaaccttcacaggtgagcgacgtctccgtgcgcttattctcttcctccgttcctcgtcttcccattaccttattgcatgtctatggctggaacatgggggatgcatgttctcttcttgctttcttggcttcttcgtagctctcgttcaaggccatccggtgatcccaaatcagcggtgtggacgctgcaggagcacgaaacaactaaacaagtgtctagtttgctgccaaagttttggcatccaaaaagaaagaaaaaacttaagcctgatgccccacctgccatttacaaccaaactgaccatggaaataaattgctaagctcccgtttcaagtgtgtaatttttttttagcaatcaaattcctgaaatgactgcttggtgcttccgtgttgcttcatataacggaattgggtctggcgcttttcactgaaaatgaaatgaaaaagaaagttaaaaaaaacttttttgatgtgataccacacactagcacggtggataaatgcatgtcaaagataagtagttcctgtttggcttttgcggtctccttgctgtccctctactggtggacagaagtgagtcttgcttccctcagccacagtgtactgcctgcatattttatatgccttaggtttcttcacgctgcacttagcttctcgctcatgctaattttctattttttttttcacgttttcatcattaagtaataagttttttgacaatgcataggtgcaaaatgcaagctctttactttcttttaagttgtgcatgcattatattacgacacaatctctattcttttgtattttagttgcaaggaaatatataaatcgcaaattgtcagtgtgtaccaattatgtttcttctgtattccaatagttaagtaatcaaggatagcttggtggtatgtagaagtacttggtgctgatttgaccaaattatgtaggcatatagctataatttgggatctcccacttggccaatgatgtgtcgatttttgactcctagtctcccactagctcatttttattgacaacacaatcactttcaccaaattactgacagtacactaatcccaaatgttaataacctgcctcctagctttcatgcatggactgacagtacactcctttcaccagcagacaagtagatattggtaacttcattttgactaggcagttgattagaaaggtccggtcaggtcagacatgtatatcccagcaaggttcctttaattttcgtccaaatcagcaaagaattttccttatggtcaccagccacaaattatgttacctctttttggaaatttgaaaaaaatacatttagatcttttactgctatttttatttaaaaaataactctgcatctagtagagctgtagcctcttcttaacatgatgcagtaaagaacaataatacaatatatctcttgtagcagtagctaggcaatattaccaaaaacaaaaggctatggaagaatcaaccaataatatctgccataagaataagagaagatccagatgtgatatgtaaaaaaatgatatccagtcaatgtgacctccatctcaaccccacaaacttcatttattagctccatcttacagtcttgcacttccatgaataaactgaactttgcacatcacttgatggatccatgataccttaaactatagggctgtttggatacgaggtgctaaactttaacagtgtcacatcggatgtttggatgctaattaggaggactaaacatgagctaattataaaactaattgcagaaccttgtgctaattcgcgagacgaatctattaagcctaattaatccatcattagcaaatggttactgtagcaccacattgtcaaatcatggactaattaggcttaatagattcgtctcgcgaattatactccatctgtgcaattagttttgtaattagcttatgtttagtactcctaattagcatccaaacatccgatgtgacaggtgttaaactttaacaggtgtttcccaaacaccccctatatattcctgaggaggaagtgattaatgcagtgaatcaaatagatagccactgcatgtggaaatgctccacagaagtgtgctagtgggggcacaaagtcaaagtgctcattattgttgtagagatatgttcccaaccattggagtcatctcaaggttttttttaacaagcaactgatgaagttataaaaagatcattattaattcctttattatattcttcctatgattaaatacaagagaattatggcatctacatgtggtctccaatatgacactttgactagcagtgcttatgatgactgttatcttaaatgggaaaagctactacctccgtcttgaatataaggaatataagggattcaaattaaagttcattctaaatcaaactatcctaagtttgacaacatttataaaaaataacagtaatatctacaatattaaatgaacatacgtagatctattatgaaatatattttcataatttacatctttgatattgtagatgttaatattcttgtttataaacttggtcaaaattataacaatttaacttacaaacttaggatgccttatatttcagaatgaatatagtaataatttgttgtcaatttaataggattttagatatttgaagtccaaaagtaaaaatggttgacttaggaaactctagatagatttatatttatgattggatgaactaataatttatagcttgaattatttttatataaaactacctccagtcatacatacacaaattttgggcaaattaaagtctggtccaatttgtgcatcttttatcgtcatgatttgcacttacattagtacttgtagtggatttatttgtaccggtaagggcatggtgtgtatgtcactatgtctagtggcatgcgtgcgcgtgcgtaatcattgtcgttccaaaaaggaaaaaaataatgattctttctggtgtattcagtttatccaaatataagcatgaactatttctctagtccctccgccctatattaataaaattattaatagtattcgggtacattcgattcattattattggtaataattaataaccatgttttattagcttgcataattattactccctccatttttgttttaaggcgtggtatgatttggcatgattttctaaattacactttgaccattcatttatcttatattatattgtttataattataaatttatgatcattgtagagtatatttgattacgaatccaaccatataaagtttacattataaaaatataagcttgatagtttaattattggtcaaaaaattgtattaaatcatgatatgcgtgtacgccttaaaaaatggagaggagtactatcgtttctgcagctgaagctacaatgtctcctgaagatcccagtgcactgacatcctatatatcagcatgatcaatccttcaatttttgttttgggttgcatggatcatggatgccttggactgtgatcgaatagctaacagtgacgacgtgtgtgcggcgtggtgcaggcctgtaccggtaccgcgtgggcgacatcctgcag

SEQ ID NO: 14634 - DNA, 3148 bp, Setaria italica
  Intron number 2 from transcript Si014497m (locus Si013948m .g) derived from phytozome v7.0 (chr-ID scaffold_6; pos 55 94822 to 5597969 reverse strand)
acgtgagcatcgctctaactcctctcttctcttggtaatgtattcgtaggtgcatctagcaaacaagtgcagctgcttgcacttgcgtaagaattcatgttcttttctttttgttggtatttgttgtgttagcaagtgttttcagttgctgtggatgcttgcataggttctgtgttttcacatgcttaattcattttcttgccgtacctgttgcattaataagttgtgtgcagttgcttgtgcttacctacatgcttctgtaggttatgttgtttttgcatgctcacacttgacttacttatgcttattcctttcctctttaatatgaatacttgtcgacttcttaagtcgtcatgcagtagtaatgggatgttgtaaattaagactcatgaactccatattcttgaagtatttattcctgggcctctcttatatcatttgattatatctgttttttgtgtgtttcttgtcagtcttctgatcagctgccgctctcgcgttcatcttcacaagaagtagaacaacatttagatgatccacagcctgttggggccgttcctgcccccgtggtctctcctgctgctgtggcgcctcctcctgtgtctgtggaagcgcctgcttcacttccaccaccagttcaagttccaattccggttacagctccagtagttacacctcagcttatggaacaggactcagttccctcaagttcaagtgctggagaaacaggggtggttatgccagaagccatgccaccctatctttatccaatgatgattcctcctccatactaccacccagcatttgttccagtaccctgctacggttatgttcctttttactatgggccaccaggtgcagcacaagctccacatcaggtagtcaagcctgtggccgtgcactcaacgcctccattaaacgtcaaagacctttacaatatgtcagaactgagcctgaagggtgatgactcaaatgcaaacagtggagtgcctgcttcccccttgcctccaaagccgattggtagaccagagaggcaatctgctttccatggcaaagggccttctggtggctcgtctggcggactaattcctgcagtcaagtgacttgatactgatcttaagcatcagttgatgtgtatgtaatgcttagaagatagcccaatcataatagcctatgctgctaaaatggtgttttggtttcttgcaaattatatactgctcattttagccttcaagtttggaagtcgtgatctgtgggtaaatatattgttaattagtttgtcgttaatttagatatattattctgatttcatcagtttatcccaaatttgttcatcaatcgccaaggtatcaattttcagcacatggcagctctttacttccattcaggacatgattttggcaaattcttttagggtgtgtttggatgtcaatattggagggtttggtattgaattaggttcaacaccaaatcagccatgatattgaaatagacagaatttgaattctattgtttggatgacaattgtattgtcttttggaatcctgagaagcagttcaattcaattcctgtttggatgtgcaaatgaattgaaacttggccgtgtatcccatctccaccgtccaagcctccacccagtcaagctcgtcgcatcgccccatccttcgctaaataccccttggtcaaataccccttggtatttggtattgaagtaagtttccaattccaattctcagatcatccaaacagcaatattgatggtgccaataccaattccaaattctggactacaatatctacattcaaacagggtgtaatagttttgtgttggaattacgtcctgtgcatcctttttagaggaaacgttctgtgcactttgatttcacttgtgctcatcattaattatccgtcaaagtaggagaggtacaagaaaaaaaataaccattacacagcaccaacttcatgtgtgactttggaagttttctatcatctaacctggacaacctggatacttttgacctagacactaatagggtgtttggtttgaggaatggagtcgtgccttatcttctcactcctcactttttttatttggtctgtggaatggaatgagttgatccctcacaacatccctcacaaactactaaatagtataaccatgaaatagtataaccatgaagaatgtggtcatcctactaaattttataggatcaattcatgatggacaatctcatctaggatgaggtgattccttgaaccaaacacactataagacacctagtggcaatacatttgttgccaagaagtttgtttaatagataatcgagctgagatcaaatacttaaaatcaaggtcattattttctgagatcacacattttctgcaccaactcaaagagtgggtgggtagatgtctcatctttttgcgttgacattcttggcttatcattcaatgagtatggaaccctcatgtcttcttgaggcagattgatgaaatgagaaacatactaggtggaagacaggaacgaaatgaatttcttctctaaatcatcgtgcagactttgtagatttgctgtgcgctctccatctcgagacactgagttagttttgcactcccgcgatgtctctaattcctagcagttgttaccacttctcggcgtccatgcctatgagcatacgcacttgctttgttgttcaaactcacaaagggaggtgcggaacatctcatcccctcttattatcttttcacttcaggcccgtgtcctatctgtcagcctcaaactaggaactttaaatcctaataagtcctcctgcactttcttttaccagataacactactgaattaatgatcatatattctttttttattgtgtgaggaatcatcgtatattcacatatcttcaattgcactaaatggtgtatgcatcgtttgttgatggctttgatggaaaagtgatctcacattcggatccctatgttggagtccctaattgtaggtactcaatacaagaaatgtgatttttcctgatagtttttttctatgagtggcaaacaattttagtgcttttcaggatttcttttctcgagtgtccagcattttatctaatgtaatttgcatatttgtctgcagttttatcaaatcacagca

SEQ ID NO: 14635 - DNA, 3975 bp, Setaria italica
  Intron number 10 from transcript Si035636m (locus Si035629 m.g) derived from phytozome v7.0 (chr-ID scaffold_9; pos 2 5275405 to 25279379)
gtgttattgactacaaagagtttcaggtaattccttatgtgattgtttgagactcatgttgaatcttcatgtagtactttctaatctagttatctaaaaaagaaaaccaaaagaaaaaaaaagaatgaaagagaagagttaagatggccaataataggtttgcaggcggggcgggttgtagacagctacatgcccattaagcttgtcgcaaactaattaagccggttagtggccatccgcagtcgcaaatatgcagctcgctatgatctagtggactttgtagcagatatagaaaacccacaaggcccacaaagtacacgtagctagctagcatgcagggcagcctgctcgccgctactatgtattcacttctctacttaatacaaacatctggtgtgtactactaatcaatgtctccgacatatcgcatagaaccatactccctccatcccagaatatagctacgtttagactttttcaaagtaaaatattttcaactttgactacgaatagtgaaataatcatagaaactaaaaacataaaaataatattagtacatttatcatgaaaccaactattataatatgtaaccttttctatttgaaataaattatttttagaggtattgttggtcaaagttaaaaagatttgacctttgaaaaagctaaacgtagctatattttgggtgggacggagggagtacaacaatagccaactttaggtgctgaaattttaacataatccataaaggcattaaaagaatagccacatcaatcaaacaattctggacagatttgcatagatgaacaagaacttgcagctattttcagtacatttcagcaggtattctttctgaataattgatagcaaataatcttgctcgtccaagcaccaacttccttgaattcttgaaatttcaaaaacaaaaaaaactcgcaaattagcctgaaaatatacatgttgttcagtaccaatgtaacacattcaatggctgtgattggtggaatcctgaagaaactaaagtacatgagggtactcatagaactgaacaatcacatagtgcaaaaagaagtgcatttgctgtgataggtggaatcctgaagaaactaaagtacattatgcaggcagcagttttctcctttagtgttagcaagtagcaataatcaccatttgaaggaagaaatttaaaagattgtatatagcaagattgttcatgatctgcatcaaagatcatgcatattcacactctttcctttggcaaaagcaaaagcattactggctttgattctcaaaagaagtaaatgactctgttcttacaaggaatattgtgagcacacttcatactgcaagaacctgagctgttcactatacacgatgcacactgtacaatattaattgctacccagaaacaacatcagatgtccctactgctgagcaggaaaagattgagtgaaaaatggaaacaaggcatgcactaacttgcacatatgaggacagttgattggaaaatttagttgtactgaatttttttctcagatttcttagcacttccagaacaagccatcagttttagtcaagtaaatgacagttcactacaagaagtaacttttagtcaaagattacaaggagttagtgcataacttttacttcttgaaagaaaaaaacaaaaacccactcatttattcttcttaatataatgatacgcagttctcgtgcgtgttcgaggaaaaaaacaaatgacaggagctccatagttatggttgcataacatgaatataaaatataaagtcagaaccatgcctcttaagttcagataaaacttatgataccttattctatggacagcttacattgaatttacaagttcaaagggagtcaatggctcttcattagatttacaagaagataatggagaaggaaagaaagcacagaatcaacaagacccggaactacaatttcagtactaggccaacagtactactctgaacaagaacaacagaattaacaagtcagatgatgcaattgtcagcttccatttatcactagaaaataaaaatatcataggattagccatcttttcccaaattttacaggaattctactttgtgtatctcttctatgtgctttgctgaacctaatcccaatcaccgaattcacatctatcatgacccaactttctcaaaatccatagcgaaatcaggatctatgccatcatgtacggacacaaaaggagcgaatgacatgacaccatcagtagtattgcggacacaatcacacaagattgagaaggggccacatttatctcaccctagcacgcatcggcgaagatgcagtcggccaatcgacctcgatgatggtggaaatgaaggcctttcccagctgcaaaggggtaagtagatgaagcagtcctcccacagtccactgcgtggggaggagatgtcgggtggccaggctggggacgttggctgcggcggcaactgccactaggtttccacgagactcgcaatgcatgttgtttgccgctaggtttccatgagacttgcgatgcatgttggtggaagagaagctgcgggttctttttgggtctttgtggttttatgctctcgtccgcgggctttgcagccaggccaacgttgggccaccaaaacttcgcagctgggccgcatccgccacatacgacgattttgtagggtgggtttgtgggctcatataagaacctgtcccgcctgcaatcctagccaataagatctaacaggaacaggtggaacatataagcatgtgtttggtttgaggatggagtggctctgtcccagttttttagttaggttgaacccatttcgtgctcgtgtttggttgagagggatgggttcattctagttttttttcttgttttgatggattaggatgtatatgatggatgacattttaacaccattagtcaccatcagccatggaacccatttgtcatcctctaacgtgcatcttcttcctcctctctttctgccgcagctgttcttcccagcagcaattagagaaccaatctctctgctccttgcctctcctcccatcttacaagaagctagcagctgcagactgcagttagctccacgcccatctaatttttctttgctcccatcaaaccaagcagcagctagccatcatctctctcccatcaatctattgcctcactgcaagcatcacgacaaacttacgctcttccccaaaataaaatccaagcaccagcacagctgtgccgcccgctgcagcctgggttcctgctgctgtacgatggcacctcacgtatgtgcatgggctgctgacgtcgcttgcagcggcgcttgtgcagctctgcctgcgtcccccagtctatctccgctgcaccgtgcccactcctgttcctccccttgcctcctgccctccttgtgctgcttgcaaggaactttgcctgctctcgctttcgctcgcctgcaggctcgcatgctgcacgcgtgaaacagaggatgggaggagcggcggcatccatctggatcgagttggtccgaagtacggagccactccaacccacatgaactcccaaccaagtacaagttcaacctggttgaacttgtaccaacccacttcaacccaccattcaaacacatactaatagaacacatgcataggataatatagtggcaatattataataggatgtgaatcaaaatctgaagtttcacaaccgtcagatgttgatggcatctcatctaacaagcccacaaccatttgcatcctctacaactacaagcattgcttacttcactttgtaatgaatgagggagtttttcttaataacttaattctaggtacatactgctctttatcagagctatcatagagaagtacggatctagaatatatggataacaaagtatctaacagtgtttcttaaattctaaagcagtgcatctggagcccaaactgctgcagtcaagagga

SEQ ID NO: 14636 - DNA, 1068 bp, Setaria italica
  Intron number 2 from transcript Si001902m (locus Si001902m .g) derived from phytozome v7.0 (chr-ID scaffold_5; pos 24 477371 to 24478438 reverse strand)
cggagcttggagcagccagcaagtgaggtaactgcatctatgtgtggcaatggcaaatgcttctgaagttacatgccctcctcttgtcttgcgatcttggttgttataattgtttttgtcatcatgttgccatgttggtgtgatcatcttgtcttgcaatgttgtgccttatgcttatcgacaacgatgatagcaagcaatacaatatgattactgaataaaactacaaatgcaaggttgctgatctttgttctttgaactaatttcatgtttatggaagctatgagttttatgtcattgtttttgagtcaccctgtgatgtgctaacttcattagctgtgttattctgtgactttcaacatccaagatgtgtttaatactggcgattctgtccctaagaaagaagatcaacatgattaatggaaaacaaccaccacttggagcacaaccttatctgaaccattcttgttggcgcagttcttcattttgttttgttgtgtgcggtgtgtttcctcaaatctagccttactcatgtgctgtctgattttttttccccttaaggctgctataatttatcaaatctggttaaaagatgttgaagcactgcagtttaataaatctgatctcaaccgttaagtagcgaagaccggagatttctgtatctctgaaattacaatgtcttattgttctctccgatatccttcaacttacaacttttaattggattatatccgttagtatttgctcgacatggttgaacgctttgagtgcattaaatccatggttatcaatactatgtggaaatatggaatattgctgcctttctcagaggagatccaagttgtctgtatgcataaaacccaaatttcttttctgtaaaagcttgttacatagtgcttatgctcgaagtctatttggttctctaaacctcaatgtttgcaaacctccgaacccagttgaatttgtcatcattgcatgaaagccacatcactgtctatttgaagtcagtgatataatttctaaatttccatagtgcaggaagtaacattcaagttcaactgaagaaat

SEQ ID NO: 14637 - DNA, 1499 bp, Setaria italica
  Intron number 1 from transcript Si034457m (locus Si034457m .g) derived from phytozome v7.0 (chr-ID scaffold_9; pos 35 65333 to 3566831 reverse strand)
gaccgggccccacattggtcaacttcacgtatcaggtatgccttgcttctgtatgattgaagttgaagacaactatgggggtatgtatacggacaaaccggagggacaactagatccaaatggcatatgtagattgcttttgtcacacgacacactcttccaatgttgttatgaagtcatattgcatgttcgacttgtctcgattggtaccctgttatagcgtactggattgtctgtctatatttgggtgcctccacctgtggaattatcagtagggtgactattgcctaaattgtcccggatgctaaaattatgtgagaaatttgtggtttgaatatttgattgggtaacttcagtattcgatttcgttattagtttaagacaattttggtggtactgtttcatggatctctatacttatctgcctttttcacatcaactgtacccttaaagtgtgccaaacagcggctgtattctggtttagtttatctctgcatgcagtgggctgtgagtctggttcaattttattaataaattaggaggaggcaatagtaattggtctatttatagttaagttagtaaaggagatcaataaacaacaaagtaaatttgatgctgtcttattgtcatggctgtggtggagcttcaagaggaatgcaggggggaggggggttgaagctattgagaaaacagctgggattgatatctttattggtgcacaaatggtaaaattagacactcccttgagaactttgcaaaaaggagggggacccatggcccctctagcctcattgaagctctgccactggtgtcatggtctcatggatttacagtcttatttattagtagataagaaactaggtgattggtttcagagtcatcagattctaacccctgaactatttttcttatttagtttgtgtattgcatgaattgcttaatcagcatgccaatacacatgaccataatgtcagaagaagaggaagattagtttatcctatataaattatctgatttcgcgatggtggactgaccgcttctcctaggacgaagcccttccctgaatcaaattagagctatgaactagtatttaaatgccacaggttatgcaagcagtattttgttttggcctctgttctgctgttgttgacattttttccactgtgttgtgtttattctatactacgcccttgtcaccatgtacttgaaccgggtgaccttttaactgcacgactgtccataaatccatgttttgtagttttttgcttttgtgaagtacaattgttcatccgaacaatattttagaatgcatgttttcatcattgtcacctatggtatgctatgttcatgaatacgtgctgtagagtgtagactttcatattgttggaagttttgtgcaagtacttatgtacttgtactttctagacagatcagaccatgattgctcttatctctttgtttaaggaggacaggaagtttgaaacaatacaagacatttt

SEQ ID NO: 14638 - DNA, 778 bp, Setaria italica
  Intron number 6 from transcript Si016104m (locus Si016104m .g) derived from phytozome v7.0 (chr-ID scaffold_1; pos 85 1136 to 851913 reverse strand)
gacactcgacaacaactcaacgaagaggcgtcgaggtatgcccttgacaccatgttgcttatgatgttttgattgctcgtcaaaaaaaagtaacattccgagttctgtattgcgacttgttaagtaatttacttgaatcgtttggcagaaagttgaccttagaggctatgcccctcgagcacttgctacttgcagcagttttcaaacgagttttcccgcatttcagcttcagtttttcagtttttgtaaggaattggtagcttaagagggggagaggataaattaggcaaacttaaaacgttaacatatggcttccactacaaagcatcaaatataaactaaaacatgctatcaagatgtcaaactaagattgatgcttgaataccatagaataattctagataccatggcttggtcacttgaataccatagcttgaatacttgaatataatgatttggatatcaaaaataccatagattgtatacttgaataccatgatttggacattgctatggtttagtttgcacactcgaatctagaaagataaaccattagtcccaatgactatattgtcactcaattactaaaatcacaaactatgatcatatagggtcatgttctttacagtttgtacacaggtatttttttagataaatgatactttgctggattattagttgatacacatttgaattatagatgctcatgtatgtcttaagaccatgccttgtgatcttggcaggctcagctgtggaaggtggccaaggctgcaaccta

SEQ ID NO: 14639 - DNA, 1564 bp, Setaria italica
  Intron number 1 from transcript Si036224m (locus Si036224m .g) derived from phytozome v7.0 (chr-ID scaffold_9; pos 52 926429 to 52927992)
gcaaattcccgggctggacgttacaaggtatttgttgacctttgcttggattctttacttctttatctggcatactttggtcgtgttttgatgctgttatgaagtgtttctgatcctgctgcctcatcttttgcctttgattttgttgtgcgacttcttttaagtacttgttatctgccttttgcttttgccttttggtgtctgcttcatcttgttttgtttttgtttgaccttcctgtatctttaccttgcttgctggttctgtatcacaaatatgatttgggtaacatgtttgccacagaagaaaaataggatggcctgacacataaagcagacttttactttctctctgtgaaatttttcaatattcagtatttatcagcatcagttgataaaaactatttcttttgttcagtaaattagcatttacagctataaccttcttgatgtgccttagatttgttttttttatttggcatatatgtgttggaagttgatccttgaaagtccttccataccaatcctagctgggagtgcaggaaaatgtggtttgatctttaacatgtgatgttgatgatctctttatcacacaagttactgaatagtgcaactaaatctggtaaacacaaatatacttgtgcgcagtgttgttagtcccaattgttactgtatgaaacttgattggaaggtgctgatctctgggggtagggccaaatttgtggagttatgagatgtcaaggctttgtataggtgcatagtttttaggtattgttctggattgtcaatttctacattagtataatgtcagatttccatagattttgttttaagatcaaatcggtatccatcaaatgtgaaaatataggcatcatcattgcaatataggaatgacaaggttgattaattacctgggtttgcaaacagtttaattttaagggtgaagctgattttaaaggtgtggaaacctatttagaggacaggaatttctgaccctttcttttcaatcttgttcttttatggtgtgaaaccaacatatagtgattgctttatcttatgatacaattgcgtatcctaatgcaatgtaacatgtgagagagttcactggccagtatgcatgcatatcactatcatggtttttaaatgctgttgacctagccattccctttgccatggttgcagctttgtgatctagaaggagttaactcctacatactcaagcaatgtgatgaaaaaatttctcttgtgtagcattcgaaatcaaatgcagtagaagaattcagtgtgtcataactagtgaactgggagttgtacttgtaatggtcaatagtagtttctttttcttgtatcatgtagtaggatacaaactgatgatgcggtgtggaaactgaactgtgccctcttatgcttttgcacttcaccaaattcttctaagatggttgcatactttctttacattaaggaaacctaacctatgcttaagatcttaactatctgatgcattaacttcagtgtcctcatgcatttctttgaaactttagtaattgtagtagtttgcatgttgcag

SEQ ID NO: 14640 - DNA, 1046 bp, Setaria italica
  Intron number 6 from transcript Si002341m (locus Si002341m .g) derived from phytozome v7.0 (chr-ID scaffold_5; pos 41 382977 to 41384022)
atttgcttgcaaagttctctgagattaagcaggtatatatgcgctcagtacccacaacaatactttgatgaggacaaaattccattaatatatattgatgatgataagttgatatttaaaattaccatgttatgtttttcttaaaatcatatgatttgactatatcctgataaacaaatccatgtgtatatctcctttagagagtctgttcacttggagaatgctaaatttctagggctaagtagcatttgtagtttttttttggctttcttggatcttggtaaactgatggttctgtgacaggatcctagtaagggtgcctgcttcttttttcccttgataatgcctgtgcagagaaacacatgcagctgcaatgtttgctataaaattttaactaaattgtatttcagtgagatgctgtcccctcccctttacggtatgcacccacaaataccagctgaaagtttggcatgcacccacagatcatcaaccccatgactgagctgcccctgatattctttgcacacacaaccttgggcactatttcttatttgaaaatgctgccacagtacatacttttgcttcatgatttgattggtaataaggtggggaaacatttccctcttaagattctcaaaaagagagagagagaagaaaagatgtgtgatttcaagaatacttgctgtaaaatttataaaatgcatcttttatcaatgcttgatttttgaatattgtgaagcctgactgacatgaaagtgcttgtttgtgttcaactgtgtgctactatgtactgacacctaacaagtctggatatagtgctgttttaattacactgtcagtgtcagtattagctaccttgggtagaaccaagtccaccatcattgtctaatgatcatatttgcttgctacatagggcaatgctatttattctgctatattgattctgacaatttgtctattgctatttattctgctatatttattctgacaattttattttgtgatcttcaggctaggctgctcagaggcaacttcattgttggccc

SEQ ID NO: 14641 - DNA, 2155 bp, Setaria italica
  Intron number 7 from transcript Si021721m (locus Si021721m .g) derived from phytozome v7.0 (chr-ID scaffold_3; pos 36 342121 to 36344275)
ttgggtgtggcaatcttctttagcacagcagcaaggtaaatatctattgatgttttgtcttaacatgttagttttttgttgagcaagtcattgcaaagttttttgttgaaaagtcattggtgttgttcattatgcataaagagaatatagctccatgccgagattaaccaatattgatgatgaatggtatatcactgcttttagacatattggacattagtagcatcatgacgtactgatatacgtgatcttataactcctttggttcttccaatttatgctcaatgggcagaatattgatttgtattgcattctctatttactgtcgactctgagctgacgatgtggataacaacaaaacatgtagtaaacaggttcctcatccaggacacatagcccttcccttgggtgagctggttgtgcgcatctagttgcatgtggaaattttttattagcttaaattggggggggggggggggtgtttgaaatgtgcctggggtgagggtttctaagccctctcccttgtactcttttcttcttcaaaatgaaatgatgcacagcttcctgcgtgtttgggaaagaaaaaaacaaagcatttggcaatagagatgaaatagtcaaaagactgaaaagcgagaacctgtaagttctgactaatatccatttccttttagaccatgggaaggtcccaaggattaactatccatttgttgtgacattgttgtttagtacttgatgccataatgtggacttcgtagaacataaaaccttaaactattgacataacatactatcctagttgcaaaccctctcaacaaccatcaaaattaaccaccttcctggtacctgctggtgggcctatagtgttatcttccagttataggtgagaagctgcatacattggccttgcgtattctttcaaaatctaaattgattcaaggttagcaaatgagattttgcttatctttgtttactacagttgagggcaggtggttattgcaaccttcctgcctgtaattttcagttcctgcaatcaggacaattaatttgattttaaattttaaatatctcttctgtaaaacctaactaatgcagtgtctgtattatggcacgtcactttgtagttataaccattggatcaaactcagtttaagcctccgcatctgaaacaagttcaaatggtggatgctcataaatttatgtgttagaagacacctttctgttgcatcctttaggaaactgtatatgcactttaattaaggatgcctgttcattgaaagacaccttctgatggtacactttagaaactgcagatagtttagagatgttaataggcaagtagacaaagtaaccagaagcaaagtgctgaccatatgctattacatcataaactggctgttatcttttgttttttgactggtacaaggcgttatattgttatagtttatcaggttcattatattggttcttcaacacttgcagattaccaaacttgcccaggatttatagcttacaatcttatcatgaggaacatcagttgaattgcgttattttgtgttagacatgctgtataaatatttaaatattgaatttgttggcttctgaactagttaaagcatagtaccttgtttttagcttctcaacatccactcgctgttggttagggttgatatggtgctttgaactagaagacattgtttgtggaggttgcagaagtgatttatagactaaaagtgacaaaaaccataatgccgcaatccaccattgattgatggctgttgcatgtggctggcatgtcaacatgcaaaatttagtgacatataagggatcacctgggcaaatgcttttgatggccatctgtttagaaagtgttggataaggaaaagttttctgcatttttataccttaggccattgctttgatcgtattcccaacctgattcttatttactctatttttatattcactttattcatgtcaatttcaacctaattctcatattttgaacctaattataccctccttttttttggcgcttgttgggtttcatctctggccaaacccaacttggctggataaaaggatgatggaatgctgcatgttctactgagtgcttgttctatcactaacatactggtacatacattgcagactg

SEQ ID NO: 14642 - DNA, 1399 bp, Setaria italica
  Intron number 4 from transcript Si006890m (locus Si006890m .g) derived from phytozome v7.0 (chr-ID scaffold_4; pos 77 9673 to 781071 reverse strand)
tggtatgttttatttttacatgctacacgcttgattttggtaattctgttcataactgcatattaaatattaacatgaggaatacctatagcaacttaagtagaatctaatacattcggattaattctttcattctttatttatcattgctcactctctgcgacttcttgtgacttctgtaatagtgaaataaagattttccgataattgatatgcttcattttatatccataaataaactgaaggtggtgataaaaggagaaaagaacaatgacatagttatgcctaatgtgcaatggtgatttgtttatttgggttagtcatacaggttcatagatcagatctagtcaagaatctctgtttaaactgggtgagggtatgcgttaggattctttcttatggagagaactcaattagagggttgcatagttggcatattctatcgcattggagcttgcttttaaggctgtctctggatgctgagttgctgatatcaatttattggagctacaaatggccaaattgatagctctctatgctgctttcctgaagccttttttttggcactgagtgtatctggatacctgtctggagaacttatttttgtgctgcaaacctatatgctttggataacataaaagggaattgcaatggctgaatatcctagtaaataggtaagcaccgagctaggaccatgtttgacatgcaggtcctagaatatccactatccatttacttcagaacttctggactgattaagaggggtatggttgattaggtttcatttcaactgtagtaggtgcagctgctttccctgttcagaaataagaaatttcaactgaattcgtttcttcatgttttaactccacttcaactcatttgactctccaactagatgtgtatacaaggaaaaacatgttacttttgcatttaaagtttagaagttgtggtatcatatttgaggtctactgcaagagatgggcttgactaataatatatatgtagcatatgatatatgtatctcagttgcttctggcaaactgcactagtccaatgaaacataacaccatgcccctgcattaattcttccagaatgtagtccagcaagatggttgcttcgtataactaaaactctgctttcggatcacttgaaagaaagacactttaggaaatttcttggcataatctatccttttatttttatcagttattttttctttcttttttgggatgttttattattcatgcatagtagattgggctggattggagtttgatatgctaaaaatacttgttgggattcagactaatagatgatgagaagtcaagcagttctttacattagttgttgatgtaattcatactagggttttattaccagggtttcactgaggttcag

SEQ ID NO: 14643 - DNA, 1675 bp, Setaria italica
  Intron number 2 from transcript Si010984m (locus Si010752m .g) derived from phytozome v7.0 (chr-ID scaffold_7; pos 18 54124 to 1855798)
ccagtcacccttcctcatgtacgctactttcactctactcttttgcattcacttgaaaatcaaaccagattgaaagggtcatgtctttgacatactccagctggaaacctatgaccctttgagtccttagaactcaatccacatgaaattattgcaaaatgttaagagatacatgacccgaggaactactgatagagagctcccatacatttgaccatcactctttgtggaaatgaaacatagaaacacactgaaactctgcatcgagtacaacttctgtagtagatcaagttaagttaatgcatttttttgtgggtgaggaagtcatcattatctcataactgcaggttaatgtaaatcaattggttgattcttagatatgcaacatgtagtacatatgaaaacctccatgcaagaatggcatgactgaaaacatgttgtactaaagttccaacataagtaacaaaaagttgcttgtgactcactgaaagtactctagttgtcaatgtgctaactagggccacccttctgtgaaccattggagtaaagaatggaacattcatttagctaccaagccttttaaggaaatagtacatcctaccaaatggctgatgccatatgaaatggcagcatgctaaagacaaccaaactaaacgcaataactttgttttaagaaattttgtggctcttgccaagcatctttttaaataatggtcttcctccaagcaacagttagtatattacaggacacaatacacactacctaataactaggtatgacttttacgggggtgcttggatcccttgctggaccttgctttgcctagctaggcaagaaaacttgcatttggtttctgagcaagctcttcctgaagtctgtgatggcaagctttttgcttgcttctgagggagagggatttttgctaggccttgctcgagctggcgaggtgaggctaggctggccaaggtaccaagcgcgcccaacatcactatcatatttcttacctttgactcaaagtggttatgtttttggtctttgtgagaatagcacaggactgatgactaatttgagattttcattttctgataaaagtatagtagatcctttttatcaggtttaatgatccattttttccttgaacaagcttaatccgaatggtccaaggagggcactttaccaccaggagctaggagattgttgctagtcactctgcagtttaccctttaaggcactacctttaccagcggtcaattcacatgttttttgtgattctgggctttagttgagatatgaactggagtccagtacagtactctgtctaatgaagcttcagtgaatatgatgtagggaaaataacattggttattcttgtttctatgcctcaagactaactttgtttacacatgtacattctggttaccccattgatctggatatgtttatgtgttagtaaagttctaaaaatctgtgaataacatgttctgggatcttaagctctgaacatttaacgaatctacacccacttacctctgttttcagctttattatccttggtgaaaagatcatttattttatttttcctacgtcagtgtatccagagtgagaaataagaaactgttttgtcacttgttcccttcaggttggtcttgcatcaggagaggggaattacactga

SEQ ID NO: 14644 - DNA, 2372 bp, Setaria italica
  Intron number 2 from transcript Si030796m (locus Si030796m .g) derived from phytozome v7.0 (chr-ID scaffold_2; pos 24 320776 to 24323147 reverse strand)
cggccaaccaaggagagtagcggaggggctctcaggtgagttctagataactctcttcttttgatgcgtgtcctgtgccagcagtagtggttcctgacctggaacttttgtgtccccatcactagcttgatttgatgccgcatcaaacgaatagtcccctggcttagcaaatttgttcgtagacaattacactcgaaaacttctgtaactccgctacgaactaattgcatacagctcagtgcactattatgaccatttcatgcactgttacctgtaaagttcgaaagaaaaaaagggcagtaagaacgctaagaacaaagtactatatttggctcctaagcagtcactttaatggcacgtttggttttggcctactgctgccccgccaaccaaggtcgcgcctatgcgtagatggacaattcctgcgcccacagcacgccaatgcaacggcgagaaaatgaactagtgctgggcagctgcgggcacggatgcatcggcgagccaacgcgcgggtgccgatccaaacagcggccaaaatatgcacgggcacgcctgcgattggcagggcacggtttggcaccgaaccaaacgcacccttagtgtcgaatcatgatgttactttttttttgttaaagataaatagaaaccattcaaattgatgtcttgtttgagctttattatgacataaatcactgggctgtgatgtgagaatactatgcattgccaagtgagtatgagatttttctgttatccacattcttttatcttagtgagatagtcatagtcagtaactcccttcaaattgttgcccactttccatcaatcaaagtcttgcacaaacttccaactgttttctacaaaatgacacttcaaataatagttcaagcaccttcctggatgtttcagaagtttagaggatcagggtagtcattttaatagtaacatctttcgtcaaaaggtggatttgttgttgatttggcctttactttgtgtctaagtttataatacgaaacaaaaaggtccattttagtaccctaaccaattctgtttgtgtggctaaccccctgaacaaaacttaggcccaatttactcccccaaactattgcacttaggccaatctaccccctaatgagatttttcttttttttttctccgtgcacaggttgaattttaagttcaaattttttgagcagatagagaacatgatgttttatgttagaaaaaaatacattaagattttttaataattatttcataggttaagaacatttaatacaactttgatcccacagatacgaattatatgaaaactatccgtgaaaactttctaaagtatttttctaaaatagggcatcatgttacaagtcacctcacaaaatttgaactaaaaacttaacatgtacatggagaaacaaaaaagagaaatctcattaggagtagtttggcaccaactgatatagttttgggggagtaaatcgagcctatattttgttcgggaggttaagcgaataaagtgaaaattggtgagggtagtttcctaatacaaaatcagttaacaaaacacagaaaccttcataagaaatttcttctgggcctaccacatttaacaaaaacacataaatttgacagcatccataaacctgcattaacaaaatgcaccattcaggaagctaagcattatgaaatctagagaatagagtcatcagcaatcttgctttcttgtagggacttttcatgcatggttaagcttgccgtgtgttgtactatgtgctcaaaatgctttaaaaacaacaataaagcctttaggttacaaaaaaattcaggtaggctaggacatgcttaaaagtttagataatgaaaacgaaaatagtacaagaaatctatttatacacaaaagagagatcactttcggccataagagtgaaaagccattaatgcctcacttaatctaatcatcagcaagctacaagtttcaaccatacactatcaacatctatgcaattggtttgagggatagccagaacatagaagcactacgcaagatttaatgatgtgttctcacatggtcaatttaaataattttatatgtattagtggtcaaaatcatcaaaatatgctcttttcgttaagtgtaatatatctttgaagagagtatcatttcagttatgaaaatggaaaatagctagataccgaattaattgtggtcttattttattatcggctagttagctttagcatcaaggtttgtcaagctagattgaaacaaaaatagaatattgtctattttcatattgctgtggagagttcttttctcttctcctcagaagctttggtaccacggtttgatatctgtactctgttttagttaccag

SEQ ID NO: 14645 - DNA, 1950 bp, Setaria italica
  Intron number 1 from transcript Si005949m (locus Si005949m .g) derived from phytozome v7.0 (chr-ID scaffold_4; pos 25 723491 to 25725440 reverse strand)
cggatcgggtaagaacttcgccatctgcgtcgcttttttccacagtcaacttgatgacgttagtggtcagcgtgatgcctgtatgtgtgcatcatgttctgcttttcttttcatctttcttgttgggtcttggattacgtcgttcgatcttgcatcatacattgcctttaactaatatcctttggtgggttttgcatcatgcattacctttaactaatatcctttggtgggttagtagctaaagttatctattttgagaaattaccaatatttagatgccttgctgaaaccataacagatagatggctgaatcatctcttcggtcttcttgtgattttactatttgtcatcaggaacagttcaaaacaccctcttcaattcttcatcaggaacagttcaaaccacagaatctagcaccaagcactctgcgatttcattatagtagttggacggtatcctctgagatttagcatactcttttatagattttacatatttcttctccacctacttttgtttacttgtcaagggcaggagtaatgcagccataaaagctgcatcctagttttgtgatagtattgtctgtacgaccctttcaatttagtgtttgctggtacttctttgactttataaggtactggacatatggtggatctgtaggtggctactgtatggtactatagttatttcggcttttgttgcttgatcagtgaacttcatcatgaatttctgttgagagctataaaattatttcatacgacaaataatttaggaataaactttgtctttactcggtttgaagtgtgttagtgttattaggtagatggtgccatataggcatagccctgttatctttagaacttaactggccaattatgtagtatgtccaaaagattaagtaaaacataaagaatattaaaacatagagcctccaaggacatctaatattgatcaaagatgatctggctgatgtgtttgatagacttggtacatgactagcatctgtgtgctggactgctgggagactgggcttccatttgaacctttatctggtattagaattatatgcttgatgattttgattgtatttctttttgttgtttctgacattttcttcaagaatattccatccccaagggcatccctaatcatcgcctccttttgtatcctttgggttctttgctattatcatgatggcaatatttctttttcaagtgctttctcttaatctagcttctgtttcaccaagctgtacgtgatgttttcttaacttaattgttttcccaagagaagggagaaaaccagcttttattagaaatagcgtataacagataaaagaaaccgaacgactttaagtatctaaagatggattgtaaaaccttgtaaccttctctttatccttgtttagtttattatacgcctgtttccctgtccaattttcatgttctcgatgaactagaggtccacatgtttctgctgtgcactatgcaacttagtaagatcccatgattccagcatatcatttagaagcatattttgttcattcttttcttatgtgtcatgcattgttgttacacaggagaagtaaaactttgaatttggtttatacttacaacgcacattataatatttacactcctcaggaggaaattcattattgcaggtctcttattttgtttgaagacagtaatgctttttagttgatgacacctaagatttgtccttttttattttgtttcctgacaccattccttctgaaatttattttccttggtaggatttaattgacgtaatcttgcttcccattgggaatgccgtacctttgtttgtgtgcgcgcgcgagctttgttttcttttttgcttttttactacgtcacaaagccatacgtaccagatgtcacaagtttcttcttacctttcagccacggagttcaggtggctttggagcac

SEQ ID NO: 14646 - DNA, 2776 bp, Setaria italica
  Intron number 1 from transcript Si018498m (locus Si018498m .g) derived from phytozome v7.0 (chr-ID scaffold_1; pos 72 77478 to 7280253)
tcgaggagggcaagccgtccctcgcgctgcaggcggtgagtgagacctctctccctcccccttctcccgtttcgtccccatttctcgtgctgcgtgtggcgtttgttcggttcccatccccccgggtgatgggatggggaattctctggatttgcgtctcgtatgctactcatcggatcggaggctgagcgatcgctcggttagacgatggcggattcgcggtgagattcccccagttcgatctcggttggggtcgttagttctctccatggcgtcatccggcttgaggttttgcgcggagagaacaaagggggtttaggtgcgatccgttctaggccttagggtttgggattagttaggtgtgattcgttccagaggatcctggttaggtgcttgggtgccttgttgcttttgcagctatccctttcggtctgctgtctacctgtttcttaggcaagcaaaaaaggagtattcgtctgcctctcctgaagaagaggtagaagggaaagcatggaattatgcacatatcttaaatactcctttatccttcatatttagctcttgtaacttatgcttatcgaaatatgtggttccagaatctgtacttccagtatgctgattgggcatagtcttcacagacaaaatgctcctccctgttttaaagtttagattcacgaatgcgttgccggtacagcagtgagtaaacaccgtacatgttctggacagacacgtgcggtgtaatgaaaatcgattgagctgatccttgtcattctatcaggttctagtgctataatgttgatcctgttgatttgatggcaccagctgattaggctgcaccgcaggatagaatgcctagctctatttgtattgtatgcattgatgattagggtaagtggtaagttcccaatacaatctccatttccactatgtcctttctattagagtttgttcccccattttgtttcaagtccagagaatgaattatcaggtaaaatgtagtgactatcatcagtaatctgattatccagatggctttacaaatagtcattgtgacttagtggtagtcttaaactaatatatttagtagcatgacctaaaatttaatttaaatttgtaaaagacggtaacattttgtcaatcctatgtgaagtggaaagttgccttaccttctcttgcattcccataaaatttgctgtttatgaagccccctaggaattcctgtagtcaattttgtccataggctatgcacgttaattctatccgtagactatgcactttgtatttacccaatgaattgctgtagttaattccatccatatactatgcatactttgtatttacttttgggactttcgaggatatgacacctctctaaaagtaggatgagacattgtcactcgcatatctcactgaattgtggcttcatgttcagcatgtctgaaacttgatttaggggagtgtcatgtcatcgaaatccccttttccttttcccctctgttaacatgaaaattgattgttttccatttttttaaagtaccatggaattttaatgattcttctgagccttccattatggtgtgcattttatctggagaagtagttaaactataaatgttgtttatgatggagagttcaagactgtaatttgtctgagcattcccaaagctgggatgtgcaacttctggtcaagcagccaagtcgtgttgactattgagcttgaggaacatgtcttgcttccgtcatttagtgaaattttcaagtttggtgaatgttatgtttctgttgaacaaactattactatttcatgggaccatttgttttagataaaatgcttaacatgtgattgagtttgagctcaactcaatgacagctttgatgcaccttaactgtcgtaggatcttatattatttgcaaaattagtggctccctatctcatacaggcagggtacacttgataatgtttatttcctgttcatgccaaccattttggatttgggctgttaaaaatgaccatcaagacctgttatagctgggaatgggtaaaactaaaaaatataggtgggaaaaactgaacaagaagaaagtcacacctgataattagtgtttgttaccctggtaaagtctacagggtgctaatttgggacaggagcacaggacaatataggactaaccaaatcttactacatatgtattggatgcggtggtgttggaatttccatatcctgtttgcattggacatatatagcatcctattcctacctgatgcatcacatggaccgaatgaaaatgctcaacctttctgaagatcgaagtagtggactagtggaaaatgctttacttctcaactgcaacattgcagtattgtcattagtgcttcctgcctgcaccctagctatgtgtgtatgtaagtcagtaagtggaactgatttttcggaccaacagtttggcaatataaaattatgcctttagtaacattgtaggtttgttctggtaattaatcaaaggttggcaatttgacaaattgtatttggatgcataatttccattttgattgttttttggaagacgtctgtttagatgccttattaatactgttgcttttaatgatgatgattatgatggatcttgtggtacttaatttagccttccaaatttaccttatctaattaagattcatttatcccatttcatgaagtcttatttctgtgttatattgattctgaactcatggaattatgcaggttctcctggccataagatcacaaggtggtgaaca

SEQ ID NO: 14647 - DNA, 1879 bp, Setaria italica
  Intron number 1 from transcript Si021789m (locus Si021789m .g) derived from phytozome v7.0 (chr-ID scaffold_3; pos 14 772317 to 14774195 reverse strand)
ggtcgagtccgtccaccgcgacgccaccgccccgggtgagtaaccagagatctcatctcactgctcatctcttcgatcccagatggtgttaggtgtatgcaattcgtacaaaattgagggtgttcggtgaaaaaaggaggacgattctttggtacgaagacttgtcgtggggacgtggtggggtcgttgctgggggtgtcggcgtgtcgctgcctgtgttggtggatttggtgaccagctgctgcctcctgttgactcggctaagtagtgccggtaattgcgtatctactcgctctgtgctcttgtggcaagcctgctacgatcgttgagaaaaatgccaggcctcggtcggcaacttcgtaggcttcttgatggttttgtgtaaaactgtaggggaaatgtcaaatctcagccaatcacaggtaaacgaatagaaaggcctcgtattgtgaaggtggccacatggtagcacgttatcggaggtgacatagcgtcaataattttgctaaattggtgtgcacagtggcaccagtaggcagtagtactgataatcggtgagtcgatgagctgcattgagctgaggaaccttggggtttattttattaggcaacagggttatacttgatatcgaccagacatggtagttatattataaaatttgactggtcgtcccatgagttttaggattcatagggcgcaaggctgttcttgatctagatgccgttttaagtatttggttgggcttctgctaatttggccgtttccacactacactttgttaaagaatttttcacactactataggctcagcctagaaataataatgtgatgcaagtgctgatgggaagtctgtcctctcactgagagaataacatgcaaatttagcttggtgcgccaagcattctctattggcattaggccagtttgaccaaaccagcaagtttgacttcattgtcattggccataactatagctcatgaaaatcatattagggttccttttttgttttcttggcaattagtttgatcagcacatgggagattatgaatgtggtgacaactcgcaaacataagaattcaggtttgctttaatgcagaactatatagttcagtagttcacttgtgcaatctgagagcattttaaacaacctggatttctgagcagcttaccatgtgacatttgcaaaaatgttacattgatttgtctgagactccaagttcgaactaggctaataccattggagttctaaaaaagaaacttgctgaccagattgatgatatgttataaatgtgattttgagctcaatcaacatagcttttagtctttaaccagactctgctgcagtattgggtatttgtagtttcgtagcaatcagtgagtgggtttgaacggattgctgcagcatatcccaaaagggggagttcagatagcaaaatgcatgtgaactctatttggtgacatgttattatacagaatatatctctttgcactagtgttaggttttatttttctagtattcatgaataatatgtatagtcctatgcacatttcttctgatgttagttgcaaagcaaaccactcattgataaccttttgattttatttaacacaaaattgattgttccactggtcgtcttatgctccttcctggtttgtaattttagttgcaaaagcaaactacccattgataacatttttatattgtttagcaaacatttatttttccataatgtaattcctggaatgacccacaaaaaaaggaaatataacatatttctatgaattacactattgaaacagtcagctaccagatcaggtaggcatttcgcagtagtatctaattttaaattattactttatcttatattgttttcaggta

SEQ ID NO: 14648 - DNA, 2197 bp, Setaria italica
  Intron number 5 from transcript Si004058m (locus Si004058m .g) derived from phytozome v7.0 (chr-ID scaffold_5; pos 47 200001 to 47202197)
accaggtgaatcttctgagaaggcttattttaaatttgtgtttataaaaaagtagagaaacttgtgtatctgaaactggcttcagtgacaaatggaccctacattgaagaacaactccctatgttttaaataaatgtcttattttctcattgaccaataaatcatgtgtttgtcaatgcatattgattcttcagacatgcaggcacaaacttgggtagatatggaagaccaagactcgttttctagggagaagcttgccacatggttaaggcatcatcatggtccgaaatctgaagacatgttcagttgcaactatactaaagcttcttttgttataaagtatgcggttgggtatttatccacaactgattgggttttgtccttaaattatctgctcaattctattagcaacatttaataaaggtaataccaaaaattgtttaattatttatgtaaaagtaatctaagaactggctacagggttatacctttctgatagcacaaaaatgatagaagtttaatctagtgcttgtaccatattctacaataagcaacctaactagttttacaaaattgacttaagttcctgtactagtgaatgaaatgcatgatgatcctcagctacattttcaccttctcgtggaagaaagagacaagagtttaaggttgactgaacttttaaaacttaccaccttagatatgtctcctggagaatctgtgccagcattttttttctaactatttcaaaactgattcgctctggaacacaatattttgaatatctataactattttaaaatacgaagaacattgtgcttgctgtgtttataatacgaagaatggaaacagggaggtcaaattctgtggaggcaaaggggtgggagttccccagatcttgcgtgcatttttccgggttttctatgccacatcacttgaaggtgctattccgttgccataacttatactcgattcactttagtttcttctttctaacaatttcccttcagagttcctaattactactcaatgagacaatgacatgatagtaacctcttcagaactagaagaaatgtccacagaggctgctagagatgatggtcgacttgccagacgtcctctggaaaatagagagagagaaatccatgctcaccgcatgttgctcctgcacctggacgaagagattcagggctattttacagctattgaggtgaggatacatatagtgattgaggtgtttggaagaggattacattgatcattcagtctagtatttaaacaagtaaagctactgagctaggcattttcctgcaactatctaacgaaccaactagcaccaagtgagctataagcaagggtagttttgagagagcaggttaggccgttacatgtagttatagagaaatgttttccaacacccaaagataactgaagaattcagaatgatgttgcagcttttgcattttgtcagggccttttttgcatgacatgtatggggatgctcgcaatatttatccaaaaatagcaactggtgtctgctgcacataaggttccactatccacctgtaacacattgcaaggacatgcaggaatgcagttggaccttttttttctattaatgcaatgatacgcagctctcttgcgtgtttgaaaaaaaaggaatgcagtcggtagatttttgccaaatacacaacttagcatgtatttccaagtataacatagtaatttaaaggtctcatgaggtcatcatgaaaaataaaatgggactgctcttatgaaaatctaacttgttcaaagccacaattgaaccattttaatctcacataattgtttcagattcacatgtagttaatcattgagtattttgaaacacaccacttcgttgttagtaggggcccaagtggcccaattgttgcgttatgtttgtagtttggtctctttacttaaatgtttgaagtgacttgtacatgcagatagtgttgcttgacctaaacatatcactgagggtggttctaggcatttgctattgcttgcatatttaatgtctagatataacacatatggttaaatcttctacttgaattaagatgagtttgtaacagtgtgaggtggtatgcatgtggacccacttagtaatctggttctggtttttgttttcttttcagcaccttggaattgctagtgaccctgaatctaggag

SEQ ID NO: 14649 - DNA, 956 bp, Setaria italica
  Intron number 2 from transcript Si016427m (locus Si016427m .g) derived from phytozome v7.0 (chr-ID scaffold_1; pos 77 26412 to 7727367)
atttgctcgggtactgttctgtagcatctttttcttacacttttgacgcaattttgctttctgttcctgtgcatccagtcttactgcttccatgtctttgtttgagcttccaatatatctcacattgatagacataatgaggaatatgagtttgagggttgtgagatgtagctttgataatttccattgtcatttgttttccggatgctatacttaatagatcttactaagtgaaaggatcaaaatcttgttagataacactttctttgttccatactcattccattcttagggatttgaccttttattgtcatcatttattgggtgaaaaaaaaaacaaataatttccgggtagagaaacaagtattggatatttcaaattgttatcagaagcatcctgctgctgtcatgctttagttttatggaatgagctatctaccttgtagaatgatgtattcatcaatttttcctctggagtaaggtttgtttgttgggacagaccgccttacgctttgactattaggttacaaactataaaaacagctcctcaactttattatttttctgttcttgttgcatctccttggggaactttctgttctagtttcaagtgatggaatgaaggagttcatggtttggtaaattttaggcatttggaatggtcataaggtagtatatacatgtaaagatgaacgccaaatgcagaatcgaattttagaagatatcaagtaggttaatcagttaatttgaatacactcacaagagggaaaaggaagaggcaccgctccttcaaagatttctgattgatattacacatgcagtgctttgttccttcgaatggaatgcgtgaattgtatttagtagagccatttttatattgttagcatgccgggtagcacatgactattaaatgcccttgctcaggtcctggaagaaacaactggtgatagcaaaag

SEQ ID NO: 14650 - DNA, 1758 bp, Setaria italica
  Intron number 2 from transcript Si000896m (locus Si000896m .g) derived from phytozome v7.0 (chr-ID scaffold_5; pos 44 125196 to 44126953)
gggagccgccggctcgcgcacaccgaccagttcaggtcagttgtcgttgcacgtagtacatgcaaattgcatgtagggaatattatcagccgtaatttctctttgtattcgtacatatatacgagcgttatttttccaactataaaataatctttggcgagaaaccatgaacacatttattctttgattctttttttttcaaacacatgtacaagcacaaaaaggctcgcatgtgcgcatgcacatgcaccctaccttatgaacgttcttttagaactatccttacgagattaaacgaacatatattgagattaagaaaactctcataggtggcttggtgttgatgggtgtgtcatctaccacctaaagatctggttaaactcgaaatctttacgtgccattattagtgacggtggaaggtcccacatgtcatatacatagcatggcatatgagggattgcaaattttcttggtggcatataaggaaattcccttttcattaatgaatacacgcgggggcatgaaccctagagatccatgatgaataaagggttacaaccatctctatatattagccaatgtcattgttgaagaatctaaccgtacgtgaacaaatctgaatggatatccagctactttgttttctcctccatgtcccatgtggtgaaaagaaagagagcatctatggcaagttggcaacatcagacgtttcaggatggagtttctaattaatattcgatttttgaccaatccaatttcgagataaagaaaggtttcgtagatttggaacactataaaaaatggcttttaactcctgtgtgaagtaattgtaattctaaaatgaagtaacccaacaattataaaaaaaaaatcaagtgttaagattaggattttcgatgactctacatgaattttgaaaatacttttttttaagtcatcgaaaatgttcagtacactctggtgaaattagtttagtaataattatataaatcagaaaacttaaaatccttagaagtcgagccaggccattggtcacttaccttagtctaaagcataggtagtagttctttttttatttgcgtccactcgtgtaccttagtcatcaaaagattgacatgataagctacttgaagcggacctaacgtgacaccgtgctctgtgacatcggccacagtttcgcgctagtcgggtgcatcattttggatcaatttttctgacagttaaaagatgctcctcagtttccctttttgaaaaaaaaaagatgctcctctagctaggcgccaacttgtgttgtgccggccaccatgttccgatcgacgggcttcctgttgacgtgacggggacgtacgtgcacggtcagtcggtcgcggtgcagctcgatcgctcaaattcatactaccaaattgtttattgctttgcaccgcggcagatttgtcgtgtgcatgccaacaaaatggtgcagtgcacgcatgatatcgtctccatttcgctttctcgcccatgcctttttcctttttgcagtgctctgtgtagcagtagcagtagcactcatcattatcagaccgatggagagcacgccagactactacaggaattagagtttgtgcattattggacactagctgtcgtggcatcttttaccgaaacaaagagtcactcgatcaaatgacgtgggctaatgatctgtcgtgatcattcatgtaaattcatgaactccctgcaggttcctggacaaggcggcggtggagacggcgggcg

SEQ ID NO: 14651 - DNA, 2805 bp, Setaria italica
  Intron number 1 from transcript Si002711m (locus Si002711m .g) derived from phytozome v7.0 (chr-ID scaffold_5; pos 30 721088 to 30723892 reverse strand)
caggtaatgtttgtggctatgccggtctggtattctttaattgcgtgctttagcatcattttgcgcacatggagaccatgaattgcatttataattcagcaatcttagcaaatttccccaaaatgcaatcttttcccaatgccagtcagccatgatggctgtctgtgacatacttccaggatacaatgttgcatgaatgattgatcagatttcgatgatgtagctgcacgaaagattgtccttcattgtgaaaaactctggatttacaatagttagttgagtgtttcgggaattttagaactgtactacgttcatctacgtacaatgctatctaggattttatctattgaattctggttggtgccttgatagtcaatgattagctgcagtccatctaaattacatgaactcgagcttggaaatttttggttgtgtggatccagacaacccttgctgcagttgggttgggattgtagcatattgtccattgtactgcttaggaaaaatggatcagctgttttattatggccctccaaccatgcttatgtgtcttctgagctatggaacagaaaattcttagttgtatgtggttttctttaatgtgttatgttgcatacaacttgctccaaacaagccatagatgataagggtgactggacaggagtcacacctattagaggtacattgtagaatatgatgatctgagttttcttaatgtcacccaaagcacttgtgctttatgatggattctttttgttcactatcctatgtcacgcttcgctgaagatacacaggctgaaagggtgtgataaatgagtttgctcaggctagatagtatcatgctcaagaggcattggctggctgatttgatgctattgtgagcaatgccatctcgaaactatctggccattttggttgttgcataaactagcctgaatccatgcaatggtacaagtacagtaaaattcctgcacaattaggtgccaaaacaaaactgcaccaattaataaactgtagaacaatattggcttctatgcttatctgtgattgtatccttttattggttgtcaaacatgtccgtttaccttccatccaagcattggtgttattctagtaaagtggttcgctgtcttgattagttcaccatcgtaattgttctatataattgaacagaatggattttaatcatttttagggtaaaagaagttatagcctagatttgggtggctatcactttatcaatcctggaatgaatatagagggtactgattgactgtatccccctgttcttgtgctgttcaaattgaactacaaacacatcttgagaactgcatgttatttagagctgttgttggttgtttaggaccttattatcttttgtttttcagaaaatttatatcatatataacatttaatggttgtgtataataccattaggtctgccaaagtaccaaattgggggtgttgtatcttatgtcttatgacaacccttattgaagttttaattttctctcttttcacgacttactgtatgtaggaaaagagattctggttcctttccaagttggctggtctatggaagcacactgttttatgtgtttcttttgtattctctgatctctaaagagtattgattggttactatttaaagaaactgtgatcagggccggccaatttgagaaacatatgtattgttttctttttccaaggatgcatagcatgtcatcaacttctttttaagcaattgaagatacatgcaggggatatagtttcctttgccaaatgttctatcacagtttatgctaatgctaccacatgttttctgagcccttttctccaaagttgtattggtgtagcagtatccatcttgcatatcatctgatgcttcatctcgcttattatctgaagcttcatctcacatattatctgatgcttcattgtttttccaattctcctagactcctaattagttacattttgtagccaagggcattgtttgtactatctgttgcttacttattacatgtccgaggcaccaattcgatctcatgtctcagactcagtttttgttgatgttctcgagaattgctgtttggtctttctcagtgcttatgtgtacaaagtagttgtgatagcaagtaataagaatgtctaagtggcatgcttttattttggttgtgtgaattaaattaactttaaatttgttgtatcaatagcagagtatactttctcttttcctgagcttttaaacatgcacatagggagtttctggagtaattattcatagggagtgtttaatgtattagtgatttctcatcaaaatactaggcttgaatttagtctctcattttctgctcagaatttatgacattgtgttatatgcttcctgatttaagtagatgaagcagatactaatatggacgtcacatgtacagccaaagttagggcgtaggtgtataatgcattggagtatatgaggcataacctttttaaagagcatccaaatttttatcttgtcttttagttgctcaaacttgtcgggtcatgctatctgcttactgacttgagagatctgagctaattaatctagttaacttggcttttgatattcaaattcgatttgttttaattgattaaaaggggctagtgaatacgaagcacatgtttatggtcttatattttagatggtgaggacgatgttctaatgtcttcattgaagtatacaaggcatatgctggcatcaaaagcttttgttttagtctttatcttggaacataatgtttacccttttcgattgcaggaacc

SEQ ID NO: 14652 - DNA, 1697 bp, Setaria italica
  Intron number 2 from transcript Si005725m (locus Si005699m .g) derived from phytozome v7.0 (chr-ID scaffold_4; pos 67 33732 to 6735428)
tgtccgctgtagccgtatgtattcttacatcatctctctggttactccattgatcacctctctccaaacactggtatctttttttatattcagatgagtctctaatttaagatattttgtggtacacaactacacatggtgacatgaagagtcaaatgtccattttttcttctgcacagtgatactttacttctaacttttttttccccttaaacctagtgcttctcaacaatgaaataattctctctctttctctgcacttattttcccatgtgatatccaagtttcatttacatcttacagcagcagtccttgaactgctgcgtcttcttccaggtcctgaactcagatatggaccaaacttgttaagtgcgccattcaatgtctaaagctccctaatcagcatgtaaccaaaactaagtgtctttagaggctgacacatggtccgatccttttaaaaacgattctgttgatttattgctgactagtgtgccatgtcaacaaatatttgtctgataggatgccacatcaagatgcgtcccctattaagataccatgcaagccaaaaccatcagcacttggagaaaataaaactatatttgtgaaagagctagcatttgagttgtgttgcattgttgcatgggtgtagtggcacttgaataggcacgcccgtaactaatgttttccatgacctaactggtttgtagttgcaggggaccttaacagtataaatcattaggaaacagtactgacaactcatacaaaagtaaactgaccatggaaaaatggatttaatgtgtagcagagaatcagttgaggtctattactatttactatcatatgataggtctcgtctaagtttcgcaaactagagatcatgaatagtggatattttgtttctcaggtgacctgtgtcagatctatgttatttaagttagcatgccaagtcaatttgatttgttcttgaggatggtttggctaaataagttacgaggtttcttttctgaatagttcctgtgacaaatagagctgtatggagatttagtgctttcttaggaaaccatttatctggaagaaataagaatctaattgttggaatcattggttggtagttatctgggtgaacttaatgcaaacacagtgatacccagtgatggtatttctgccttttgtgaccagtggaggaaggggtggggggcactgtattaatgaaaacacttacgaagttagctacataattgacttttagaagcctgaaaggtgaacctcgaaagttgaaaatagcacctatgtattttttttttacctttaggctagtggtaccagggagcctggattaataatatgtaatttgaaattctactccattcttttttgtttaacatcctagaatctgttcaccagatttctactgtaaatgcgtaaataactatcaagattaacaatatggtaattacctgactagatttttctttgaaaatgctttcatgaaagtacaatctttttttagtttatattgatattaatttatgagattaactatatgataattacctgtttggagaccgtgcaatgccaaaaatgtcaaataaaatagaactgtggaagtattttgtagctaatgtcaaaataataatagttctacttttgtaatccattcattttgcagttactaagtttatgtggttttcaggagc

SEQ ID NO: 14653 - DNA, 2007 bp, Setaria italica
  Intron number 1 from transcript Si000653m (locus Si000653m .g) derived from phytozome v7.0 (chr-ID scaffold_5; pos 39 968735 to 39970741)
aggcggccgtttcttgatttttctgctagccgaaggtttggggccttctccgttcttcagtccgtgctttcttgttttctgcaatctttgccttcggtgtttgattttggtgccaactttaaattctggattggaccctattccccacctttgggagaggatttatgcagggcatatgggatattgcaggttactgaaatgtagtttgttatgtttgacctttttgcaaaaggtcactgtttaggatttgataaaatgtgagtagttggttgtagctgctatttttttcttcagcagacgagaaaattgaccgatttttagtgtttgaagagttgggtagtttgaatcttacgttatttaaagaaccacttggtcagtacttagtactactctctggtgtgatgagttcttggttgcttttcctttcctacactgtatttgttagtgatcccatttttcatatcgaaaaagattttatggtgtaaatgctgtttgtgtggttgagacagtcatatcctcactttactgggttcacaatcgattacgcggatggattcgcgtgtagggccatgccaggctagcccatccagggcatagaacaacggcattaattcaaccagccccccaccaaaagttcaaagctctcgtctttttccttcctttggtttcttgcattgcatcagagagctttcgcttttatgtgctagcctttagtatatgtgccatcacttttggtaagcatttggttctttagaacgcaacggcatgactgttgcatcaggtgtagagggaaggtttgggtcagctataatgcagtattatgggctggtacattatggagatcacctccaaggctccaagtacaggaatctagcagttttcccctttttggagactttggctaaacagctcttggcattatctgccactgttctcttatgatggttgttagtcataattccagtgcttgggggcagtgtttagtgagtatttttgtagctaatttgttaatataatgtggtatgtgctttattaaaaggaggctcgtgactgatgaatgatggctactttctgatgtgatatggatggtttgcttttgtcatatgctcctgatcccatccccaactgccccgtttaaaaataggaagataaactatggcaggtcagtttgatgcttgtctcatggttgagactagggaaaagacaatgagggtcatgtgtgtttcctttcagcgggacgcccttcatagcatgcctcactattaaccacttaaatccagtttcttttcctttttattccaacaagggctgtgttctgatttctgaccatggtagctccagttgccaaagtgaattattctgggttatgcaaagtactagcataggtaggtacagtttgggtagctctcaatgctgccctgaaattcctgaagaaattgtcatgttgtacaaggtacactctgttgtttagtgttctaatgcagtaactttttgtacttttagtgtgtcacagttctgtttaggccgtaagtgttgtgttttgtgatggaatacctaacatttatttactgaatcggggagtctgtttatgaaatgagctaaaatggggccttgatttggaactaaggagagatgctactgacaggctgttagtacaagaaaatgtctacttcctgcctatctatttgaagatctcttttgtattttgggggttaaaatatctgatgtattattttctacaacatttgccagatgcccatcttttcaaaattctcagattcttttgatcgtctttatttttctcattaggaagctagcgatgaaagtgtgtcagaggtcaaaagtttgtgcatcatgcatcatatactgaattctttcttttatatgaaatatgaatatgaaaggctatgttgttgtatatgaaatatgaatatatgatcttgatgttatgcgctgtttcactaacttctatttcttttcttgtgctgctagaggattgaagttctg

SEQ ID NO: 14654 - DNA, 516 bp, Setaria italica
  Intron number 3 from transcript Si007094m (locus Si007094m .g) derived from phytozome v7.0 (chr-ID scaffold_4; pos 39 974947 to 39975462)
caaggctagatagcccttggcagaaggtaagcacagctttttcatgttcaactcaaaatttgtagatagataaaactctcagaatgccttgcagataaaatccatagaatgctcttatttgatatagctggtaggatatgttggtgcacatctagaaatgctgaatgcatgaggtgtgattttaatgattttgtctttagatgccctgaaactatggatcacaaagcaaacactgagctgggagaaaagtgtgagaaagctacagctgaaccatctgaagtacttaaacaacaatgcatttaactcaatttatagcatagcatgtgcaagaagtaagataagatgatattgcattattgcaagctactctgtctcttagggaccattcatcctaccaagatgttagaccgttattcatgaagacagtgtgttggtacctgaagggattttttctctctcattgctatgtatgcacttgtaggcaattcgccttggcaaaaacttcagggagcttct

SEQ ID NO: 14655 - DNA, 958 bp, Setaria italica
  Intron number 3 from transcript Si011038m (locus Si011038m .g) derived from phytozome v7.0 (chr-ID scaffold_7; pos 16 783555 to 16784512 reverse strand)
tatttttccttgggtaaggcttatttttgtatgattcttctgtccaaacaaagctttaacttattttgcatgatttatcagaaatatgacttcttagttcttacagtggcacgcatacatgaagtgcttataaccccaacttttatattttggccctagtagtatttgtagtatggcccatgtttcagtgatgaacgcaaaagcgttgcatggcattattcctttcccatataaattcagtgctgtgtagtaatttttatctatatcggttaacttaatgttttcttttaggtttaaatttggcatggtcaatcagtgaacactttgtggcattaattcattatgttagaatcgtttgcttacccctttctcatgctagttttatgttttaattcttccctagatctgcaataatatattacttgtaaagtataaaaaatgagcatggtaatatgctttttcttgtttgggtcatctagtggaacaagattattatgctatgagctatcttggctctatctaatggtgatgctgtatactcttggcacctcggttcatgtttgagcagtgtgtcagaattgatttggttccagtcagatgaaatcctaaaattcagcactattgtgtcaatatggtacaatggctctatcaataacaattcagtttcacagaatttgtttagagaacagatgagataaattagagtagttctggcatttgtatcttcactcggattatcttccttagacaaggtttatgatgagacttgaaccgacatttgtcagaacagatacatacatatccttcaattgttctgtcagatttgatatgtactttctgtttacattttttaagaaatgctttctgtttttattgttaggaagggtaactattttatttatgtattcactgttatgatgcagcgcgtaccgatcattatacattctcaactggattt

SEQ ID NO: 14656 - DNA, 1290 bp, Setaria italica
  Intron number 3 from transcript Si010062m (locus Si010062m .g) derived from phytozome v7.0 (chr-ID scaffold_7; pos 21 481029 to 21482318)
tcgtataggacctgcgactccccgaagatcttcaggtatgttcatctttcattacttttccacaatctgaaattgtatagtctttcttcaatcgactatagatttatactacttgttccatgaatggtccaactagtactcagtttgacttattctatggaatggaatgttattggacctgacctggttaccaatccaggcaaggccttgtatcatccatcgaactgtattttgtagaaatcattttttattaaacgtggcatgcatattacagatcaaccttttctgattaaaatggaaccatcattaagtagttcttctcagcagagatagaactagctacccatccatatctggtttgctaggatgcttagtcccttcatgcatatgcaagttgagcactaacagtcatgtaattttgctaatgtctgcaagcatctggcccaaactgatcacctgagtgacttaacagcctgtacctgaccggaggaggtgcctatctatctttcattctgcatagactgatttcctggtctatgcttattggtagctattctttgatgaccacattctgaaagtcacttttttcccttttcacctcctaataccctaaagtagttcaattgtttgttccatcctcccaaagtctaactagttttgtgtagtacctcccatggtctgataatatttagaagtgaattattgaaacacatgttttgtgtttgtaattatagaaaagttctggtatattgacttgtggtacataagcccagcttttatggccatagtgtttcaaaatattgatgcatcttgtcacattaggaccataaatcacgcggttttgtgccacaacacaagatatccttgattttctgctctgttaccatggaaccctgcttttctccagtttaccgccctctatttatctacaagtatatggctatatgtacattttgccttgaggaccatatgttaaaaatctagttcatgaaaaattaagtatagagctagcactgcatgtactgcagtggcattaattcggtaattcctccataatactcctttaatagctatattcctagcttgctatatgttatgttacagatacattgattgaaatcaagttaatgtgtccagagcatgttatatatcatgcattttctttgtagagagccttgggatgctgctctttcttttctgtaatcactctggttttgatcatttgttcattcaacttgatgactacttcactcaggtgattctggctcctcgactcctggtcattcagat

SEQ ID NO: 14657 - DNA, 2065 bp, Setaria italica
  Intron number 7 from transcript Si026100m (locus Si026100m .g) derived from phytozome v7.0 (chr-ID scaffold_8; pos 34 571803 to 34573867)
gcactgcccacacaaactcttcacgaatattctaggtacacaaatgctagttttctgaactgaatgaactataagattgttttaatgatcttaagcatccccaacttaatataagaaattatgaattcaccggagcataagtttgctcgaatatttgcttaatttgcacgagcctgattccctttttttgcattttcttacaagatcaggtaatataagggcaagttaatgctccaccaattgatgattccataaattgtattggaaacttaatggtctggtctagctaaaatcccatacaaatgatggttgcatgttgaatcaatacaaatttctatttgcatgttaggataatgtgcaacgtagggcctctccaatggatcttagctggttctatgcaataaatgcagctatgtatcctggtttcattacattgcaggactgtttctatatagaacctggttctatctatagaactgggttttaagcaattaatagaatagaggatgagagagaaagagtggagggaggggtgtgggtcctgtttgtagattcaagaagcaattcctcacagaccattaaaaaagtttgcaattccatatctaccactgaaaatctttatgcgcctctcataccatcggttcaacttttttttttgacctcagtgccattatcgtctacttttggtgttaaagtctccgttagatgccagttacttgcagaaatgacttcaatacccctacttacaggacggtcccatccgttttcttttctttttcattttggtttttgcctccctcttctctttcacgtgatttcgttaacccaatttgtccagcggccgatggtgcggccagattgcagcggaccgtggcagcacggagggtggacgccggcctagcctcgcggggcgttgccgcttggttctgggctcctggccccttctcgctccagcgcgagtccttcctacgcaagggcaccatgaagctcgtcaggtggccggtgtggtggttgacagcagctgtccatgctcccagggcggcgcgcacccgatgacaactcttgatcttcttggcctcgcaaacgccatcctcggcctcgacatagaaccggcagtgtgtgttcagcgcaccattcttggcttcagagtgaagatcatcgatggccttggccccaggatttccagcgcgtggcggatgccatcccagtgatgcgtgacctgccgcggagcaagggaatggacagagcaccacggatgatgcggggacgtagcaagaggacgggctacgcggatgcacggtgtggacgatgcgaaggggcagcaagagggcgggctgtggcgctgcatggcgtggacgatgcgagggtgcagcaaggagccgcgtgcttggatggggcagtccggcagagaaaggggaaactgtaaccagagggtaaaataggcatttccgctcactgttacctctcagtcctcccaaattagacggcaatggtactgaggtaaaaaaaaagttgaaccgatggtacgagaggcgcatcatgttcttcagtggtagatatggaattgcaaacttttttaatgttacgtgaggaattgcctctagattcaacccctggttttatacattggtgccaatataacatatgacatcaaatccttgtaggtcccatcgaaggaacatggtttgggcagggatggttctatacattggagatgccctaggtgcataaataaatagtgcattaattgcatcataaatttatgtttccaaaaccatacaacaaggtcatcgcataaacagacaataaataaataaagcagtaggatgacttatgaggattgattttgaagaatctagtagttacagggtgccaatggacgatattgagttatggaaacgaactgaaaaaccaactaacttttgaggattttaaggaattagttgagtaaaagggtgatttaatatgagagttgtactggctagtttttgctctatgcaggaagcacccaaaattttcattgtgccctaattttgaaacacattgttcacttagatttaccaag

SEQ ID NO: 14658 - DNA, 737 bp, Setaria italica
  Intron number 7 from transcript Si030634m (locus Si030634m .g) derived from phytozome v7.0 (chr-ID scaffold_2; pos 47 089140 to 47089876 reverse strand)
atcaagcattaaacatatacaaggaggtatatcttatttatcagttggaaacagctcatatactttaagcagttagactacattggtatgagtttcagatttcctctcatgtatgttgatctgattctaggtttttgcagtgtttaaatctgtagaataagaaataagccataacttgtgcaggcaagtatagtttcatgaataagtcaagatcaatgtaactagataggtttattagctatttagcaaatcaactgtccaaattattgatttaaatgctttatggttatgactttttattcgctagttataatgaagttatgactttttattcgctagttataatgaagttatgactttttattcgctagttataatgaagtgattgctggatgtctcctactctcctcttttactaaacatgtgccgttttagccttttcattttgctgttagattgtgtcatttttaccgttgcaatttatacagtccccctggcaccctccctcaataactgaaatatgtattctaagatatattagtagctctttagcatggaaagtacggaatatgatcatcaagcaaactatcatcacatcattgccatatccctcgtgctcgtgcaagaacccagcataatatctaccaaaagcatagttcaattgcacattataaattattccatgtggaatgctctgttgacattgttgaatctacttgattcaggttaacactctg

SEQ ID NO: 14659 - DNA, 1117 bp, Setaria italica
  Intron number 5 from transcript Si021103m (locus Si021103m .g) derived from phytozome v7.0 (chr-ID scaffold_3; pos 13 120940 to 13122056 reverse strand)
tcagtgaattaacacaacgttttgctggtcgaaaggtatgtaagaacttgtcctttacttactataaacttataaatcattataataaatcagatgcgaaaacatgttcgtcactatatgctccatctgattttctgttagcttgacaaattgcgcatggaaaggtccataaccacttttttatttatagatttgtgactttatgtgagccccctttgaaaacatttgctttgtagcagggctgccaacatgataaagtagttttctaactccttcaagtctgtgttatttctttttttttgagaacacatctgtgagatgcttggaactttgtgttatcgctttcaaaactagaatagacttttgtgtcttttgaatttataatatcgtcagctagcatgagcaattcacggtaatcctattacagatgcaaaattaatgtatctataattatagcttgtcatcaggataaggatttgctatgtatgtcagcacaagaatacaagaacaagatagcatttcttaaacatttgaattgtttgattttactgaaaaactcaaaaactgttcacctctgaagaataaatgccatatcagcctgaagctttatattgaaatgactattgaacatagctggtcaataatctgtggtcatagctgagtgggccctacatttctccgcactttatcaaagtgatcaatttgataagcaggacagtatttctgctgtgatcactaaaatatgtattatgtatgcattgatttgaacatccagtgcactctacagtacagtggttgctgaatttgaatgccctggaagtcttcagtttttcttttctaatgttagctgatcaccacccctctaggtgacaggataccactactgattttcctttccaccttttatttctaccttgtgcatattagtagttttaagtgctcatcagttgctacttatcttaatccttttgctatcaacaaaattcctcttttttctttacatgccttactaacctctgtaactcctttaaccttgaattctgtcttttttgctgacatttaacgatctattattgttccttatatagtttcgttttctattctaatgtgataggta

SEQ ID NO: 14660 - DNA, 2100 bp, Setaria italica
  Intron number 9 from transcript Si000082m (locus Si000082m .g) derived from phytozome v7.0 (chr-ID scaffold_5; pos 25 220980 to 25223079)
aaggtatttcacttagtgtgagccatgctttattatttactgtttcactattggggaatagtaataattattcttaaataacagtgcaaagtaatatgattagtgtgggataaatcataaatctgttaaactatgttgacttggactgtattgacatatatatcctaggatctggtagcatattaggaaatagtaggaaaaggatcatggttgattgcttgttatctccagttttgcactgtatcttttatggatcacaaaagggatgttcacacggccaaaaaaaggtggccaatacagttcaataaattaaaacaaaaaatcatgtatagtacacacaaagttaaatacctgcttaaaaatattctcaaattcatctttgccgttgagattcagaaactgcatattttcagcacctgatgaacagtgccagattgacttcttgtctgttttgtttcttgacacctaggacaaatttggaactaaattgttgcaggcgtgcagctaaaccaactttatgcgcaagattttatttacttttgaaacatttcaacattgtaaattcgctactgggcatgcccgcagtcctggaactcagatcagcactaaatccagttaccaatcaccagtctagaaacaccagcttaatgaggttgttaagtcaaaatccagttgtttaaagcagtttccatggttcattgctacctgctaattaatatgaaacaagagaatcagagtgcatcttgatgcattttctaaggctgttgcctcatggggctatgacatttgtaattctgtacaagtgtaattgtcagtgtcataattgtgacactgacaattttctatccaagtcagcaacttaaaaattttagattgtcaagaactgaacagttgtgcattgctattcatgcaaagtaatttacatcacatgtttttcaaagaaacgttataatctggcttatttttgcatactctgagcaaagtcatttcttattgttgaattttatttgcatatgcaagccaatctcatggtacccaaatacatctttttctttcttctttgtccccaagaatacaacgaacgataaaatgcatccaaacaagttctgaacatgaccacactgaaacattggagaaactgtcgtccagttaaaaaagtacattttgggttggatgcagccatgtttcaaatttttccattgatattatttttagtattgaattaaacatttgactgtacgaagtagatttgtcccgatttttttttatattgcaacttctctatttttataaatatattattttggaagttactgttcaaactttttattttgaagagtgaagaccatgtcaatatccaaaacaatacttttttggtaatccgggggagtacaacataagctcctgtatgtacatgatctctcgatagtggaatagtaccacaagggatcacttggcttgtgtacagcagcctgactaggcttgtgagttgtgacctagaggtttttggaaggtgattttgatgacgtgaatcctactcaaggtgatatttgtcacattagcagccatatcaccaagttgcttattgggcaacttcaggattattaaatccatttgcttgacctcttttcctcctgttttctctctatttctctccgctatctttcctcttctcttcatcctccctcttgttggtatccccatctacgaaaatcaatgacatggcaaaaaccaccaagttggatccctagcaaaacatcttttggaaaccactgcagtgtgtacattgaccctgttttgtaagtgggtaaaatgcctggttttatagtttagggattaagtgggcttttgcacagttcagaatgtagaatagaagtttccacagtttctagaaagagaaatattttgagctctaaaagctgttcacttcaatttgtataacttgtaatggtatggctttattcatgtctatacgaagactattttctacttggatattgattatattgctgtggtgcatctttgtatagaataatattggctcaccatggacttcaacttgcaggaggagcacggtctctttcagtttttgatagtgat

SEQ ID NO: 14661 - DNA, 594 bp, Setaria italica
  Intron number 1 from transcript Si028854m (locus Si028854m .g) derived from phytozome v7.0 (chr-ID scaffold_2; pos 12 335559 to 12336152 reverse strand)
agttcgtgagcaggagcaccctgcaactggtaagacccttctccctcctcttcttcctttaattaatcctgaaaccgttcttggctggagatattgcttcacctatccagggaaagtggccaaaatgtaacacctgccttgttactaaatttgattgacatagatgatttgatgggtaatgttgattctagtgagctagtctattatctgataccttattctgttatcttgctgcttatggagatagtgttttcagggccaccttttatggccttttctagaaagtatttccaaaattgtgttcgatccatatgcttgttttactgatttctgcagatcaaaaggctgcattttgctccagtgtttgtagctgtattaagaatttcgttggctttactgaacataaaaactgcaaattgctatcatctgtatttcaccaaagcatcacaagcttgtcaagaacttttcccatttgatttggttaagctgtaggtaaaaagttgtgagtagtccagggtatggtatggaattctgttgtgactagttcccccccttattaatcatttttttttggcaacactcagcttgacttcg

SEQ ID NO: 14662 - DNA, 3826 bp, Setaria italica
  Intron number 4 from transcript Si015193m (locus Si015193m .g) derived from phytozome v7.0 (chr-ID scaffold_6; pos 19 194631 to 19198456)
gaggggagctcttgtaagcccttttctattttggcagaagcatgatgtttttgttaattaggtgctgactgtcctgtttcaaacatactggttgaacgttgcaagttgtaaccggatgtatcttgtgtatgacttcaacagctcaatgcatttcatgatctttcaggcttctgttagaggaacatagggttgttcctcaaagcttatgtttggctacacacaataccttgataaatcagctatttgatgttgcttagttgatggtcatatgcattattatagggcaaagatgcacaacttgattaccagtagcagtttctaatatcgctctgttctgcttagacccaacatgaatgattgtagctaaattctcctcacaagctaatagttcacagttttcatagacattcaagtgtgttgtccgtaggaagagtccttctattcttataaagtgaaaatgatcaattaatcactatcatgttggcactgtaaactcggaccattagagttataggtaacaaataggacatgtaccctctgttcaggatctgttgtggttagctgtagaaaaaactatattataatattgtctatgggtttttatgttaagttaatcatcatgtgattgtagctataaattaaaacaatgtgataaataaaatttaaaaggaatacaagaggcttctttctctatttccaaaaatatgatagtttataggatctatgtagagacaaagactgttatcagctatatgctcaaactgaataaggttgtacagttgagtttatttcatctctagcaattaccggtctctcaatttgcgaatatcacattttaaaagagtaagcttcaaaaacatacgactattttggcatgttgcagaaaactacaacttttgacacccattgcacaaacctacagctattttgatacttactgctggaaactacaattttcttacaaagctacaggttgacataatgggcctaccttagaggctgatgggtgggtccatcttgagaaagttgtagctttttgcgacagaagtgttgaaatagttgtaggtttctgcagtgggcaccaaaacttttagctctgtgcaacatgtgtaaaaataattgtaggctttgagatatcctccatttaaaattgttaacaaacatgctgatgttcggattctctgatatattaatatgatgatgcatcttctcgctgtagcaaccttgcctacagaattgcatctgtgctcctacttaatgtttatttgccctatgctttgtattgttcatgattctcattggttttcagtgattctgtcttatgtttgtggtagcactgtatcctccattgtacagcacttttggggttggcactcctggcattttttgttggctgttcacttgatctaacaattgcgtgaagacgacaatgacaagaacacaagtctccttttcttttcctcctttttccaatgttatatagagagaacacatctgcttatgcaaagctattcccatcttgtcacgcatgcatgatggactattacagtcttactccagcattgtttagtacatggactcatgcaacaactaatgcatggatcctatgactaacaaagttaccatatagtatatgaaacaccttgatctcttaccaaattagtcacgcaggactccatacatgtggcttctgccaaagtgtacagcttcctactagctactcgggcgacaacaccatctgcacctgcacggcacctcctaaatgcaggattaagattatttctgtcatttcacgcctttaatcttggtatcttcaagtacccttgcacttctttcctgcttccgctcgagttctatcatctccacttgacatggaggcagcgcgcgctggcggggagccaggcggcgacaccctggaggatggcatactggcacctaacgaggaggtgatggagacgtaccttgccagaggacagcgagttgcaaagatggtggggatcaggagcccgcgaggaagcgaagctccgggaggagggccaagccgcgatgctagaggctagaggggtgctggttgggacggcagcatcggtatcgagagtttagacttgagacggaggatgacgatgactggggaggatgaaagtaatgggctattgggctgttcgtgggataactttggctcattactcattcttcttctctcgttcttttttgtttttttctggtacatatagtgctaactcagccaattagactaacaaagggcatcatctaatcctcgcctagggaagcgcctagacatctaggcatccagtcagttggacgtcacctcacctcaacgcagcgccgtcacaactatgacaaggttaccatttgtgtcgtgccaaactcatgcatatgtttttgccaccacggaggatgctttgatggctccatcgccgtgacacgcttaccagcaacctttcatcttagcctcagctccaattatcttctacatcttgatggtgttgtagactcactggagccgacccacaagaactctgcacactctactcacctcgcgtgcacccacatgtacttttgcactatcttctaacatgtgtattgactcgaactaacatgcataccgacataacataatagtaccatagtatgcattcatggccatgatatgatactgttgtctgcgtgtacctgtggcatcattgagcacaatgagattgcaggcattctagacaccttgtacagctggatttccatggtctcccttaccttgatgaatttgtgctattggtgcacctgggttgcctcctttaacggtgccttcaatgctgccttgcttgcctagcatctctggaccagtgttgtcgatgtcgtagcctctcactactaatctgatgatggcatgctgctagtgttgccgctcctagacgtagcactagcctccggagagcataatcttctgcatcttgattggctcaagtctctgatgccaaaactactggttgttcacataaacacaagagaacacaagtttctttgaggctgtgattacttagccccgtttcctttccttttccactcctttttctcatgttacatagaatgcaagctgcatgttgtttcattaaagaagaggaagtgaccaagtacaaccccaacccacctaaaatacatttgcaacatacgtaccacatataatgaaaaagagctaccaaaaacaggaatgcataccagcttatacaagcatgactcaacctattatagtatcatgcacacatgatgaactcaaactcccaacatcgtatagcatgtagactcatgcaacaactcaagcacggacccataactaacaaagttaccatactaaacaaaacaacttgatctcttacctaactagtcacctgaggactccatacatgtagctcctgccacattagacaccttaccactagctacaaaattttgactatcttgtgccgcacgtcaagtcctacacactagtacttgagaaacatcatgattgcttccatcattctttactggagacctttgtcggttgattgtagttcatttgatccagctctcatgatatttgattgacatgacaatggaattgaataggctaagtctaaattacgtgtgcatataaaatgttatatatgggattccttctgcaatgatacaaaaggtgcttttgtcatatgctatgaacatgaattattatttccatgcacctttcctgagtgataaagcctgccatattttgcatacttctccaatattctaatttcaccacttttttacttgttagctgtgaaggttc

SEQ ID NO: 14663 - DNA, 1225 bp, Setaria italica
  Intron number 2 from transcript Si036792m (locus Si036792m .g) derived from phytozome v7.0 (chr-ID scaffold_9; pos 14 462096 to 14463320)
cgtccgcgtccaaccccgtcattgccgcgagccaggttggtgctttcccctcccttatcacaatcgcaccgcgggcgggatgcaatttctggaatgtagttttgagaaatgaatatttttgatcgacctcacattccactagactgtaaaaaggcagataatgctgaaatcgagtgggactttaatccgtgtcaaatgctagtctgtgtctcggtgtgacttcggaatgaatggacctcacacatttttatgatctgatcgcagataataatggaatttattgaatttttcttaggcaaagtcaccgtttgctgttctctatattcggttcagaaaatgtttctgtcagatatataaagcggctccattgaatgtttctatccatggaaaacactaactagttaaatattgttttgcccttaagaaagatgctatagctgttggaagcttttgagggctctattgaaagatgatttggtactgtactactgttcttgtaacgaaatgaattcaacctcaagagttcgtgttattcaactttaaagaatctgtcagtacagttaccacagcttgtgatgtgaactactgcaacatcttttttttgaaagatcgagctactgcaattctctgtagtctggagagcaccttaaatttagcatcctgcacaatctaaagctagaagtagtgctctgattaatctattggataccgatatatgagaattcagattcgcattgcatgttcacaatatgggttctgatacagctatgagtatttgtggagatatgatcatgttgctgtattcagtcatcagattaattggacgaagcatgagcattttctacttagatatatatatttgacagaatttctatggagctgctaagaaataactagctagtgttttccgttgagattagctagttatctccgtgtattttgtgtttgcaaagacaaatttcattttgaacatatttttgcttagggttagttgtgaactacgaatatatttttgctttaagccagaagtattcttcattttccttttgatcctgcaagtctgacctgattatgcaatcagtactactcaacattttttaaaacttcatcctaaatctaggacatattttcttgctgcagtggtattttaatttgctgagtttacattattccctgctttctttgttttttagagattgccaccactctcaacggagccaaatag

SEQ ID NO: 14664 - DNA, 2094 bp, Setaria italica
  Intron number 1 from transcript Si010807m (locus Si010807m .g) derived from phytozome v7.0 (chr-ID scaffold_7; pos 22 31591 to 2233684 reverse strand)
agctctccgccggacgccaactctccgtcaaccaggtatttgctcattagaagatacgccacgctccatattcttccatgaaaccagtttgagctcgtaattagttgaaactatcaatgaaatttcatcctgcgggccttcattgggggccactatcaatgaaatttcaggtgaaagatcctctcccttacgttgaccgtcaaaaaaaaattagatgaaactgaaaccagctttgcaatgcgaaccgtaatttgcatgtatcagcgaagaggaaatgctaagttacttcgctgatacatgcaaaccagtttgagctcgtaatttgcatagcaaaactggtttcagtttcatctcaaattacgagctcaactggttcattcatcagtatataatacggccaactagtagtcaacacctctgtcattagcatttcctcttcgctgaaattcaaatcagttacaatcttttaactccatattgatcaagtcttgatcatgcagggcatatatctagtcctgggtttctagcatttctacgtttttctttccctcttctctgatttaaattgattgcagatatggaaatattttaattaattatacacaacctagaagattattattattattagcctatgaatttgtatgtagaattagaatatatatatatatatatatatatatatatatgggaaaaatagctattcaattcatatatattcgagtttacagctgcttggtcctttaatttagttgatacatgaacaaaaggtagctacctagattgtcaaaatgcttgatgatcattctattcctttcttctgagccaagaaaaaaaggtgctacaaaaagcagcttaatagccttctttaccatgtagtactgtaagcatgcatctttttcctcttctttcttttcagatactctcctactaacccaccagcaaagatgcattgcatgttgacaccttccagaaccctactatctctatatttacagcgcttgttggatcacttttgattaattacagtaaagtagtgtcagtactatatagatttgcgagtgtttaaagtgtatgcgtcaagactataacatatgttcctagcttccacctgaatcaaggaagctacaaaaggtgtactccatccactggatcggaagctgcctagaacctctattactttgatgatggcacatgtgtaatgtaattaggtgccctaatcatgactagtagataaaaggtagcctttactctcttatgaatggatatcctgataatagtgttatggccataggaggacgtggcaccgctacaaaaatgctataaatacaaggtaccaaaaactcgaaaatatattttattgaaaaagtctattttactgtctcgaacaatttgctttatatgtttcatcgtaaacaaaattcaggttcattttactctctaaactatttaaaatggtcaaatttaccctttaatgttttttgtttctccttatacaatttgaatttgaatttcaaaatttgtggagtgatagctgcatcatgccctatgttataaaagtgtattagatttatttctaattattttcatgggttgggagcatctgctattatttacccatggaggtactaaaatgcatgttgcatgttcacaataaattatcaactcatcttgttaatcacattttatgatttaatgtctcattctataaaatttaaacataaaactcaacttgtgtctagattgaaccaatatatatatatatatatatatatatatatatatatatatatatattgaggaaataaatgagtcgaaatcccccctttcaaaaaggaatacaattgtttgttctcttgttcatatttgatttgatttgacgatccaacaacatttcatttgatattccccccttatatatacgcaaaatgttaattcctattcgcttgcctatgttcagtaatcaattggcactcttgttattactgatcatgaagtaatttccctcttttaatacgttcccatatttcccctactcaatcgacgaatacacgtacagaaccgagcggcggcaacgagacccaaccaccacgc

SEQ ID NO: 14665 - DNA, 3137 bp, Setaria italica
  Intron number 1 from transcript Si003285m (locus Si003285m .g) derived from phytozome v7.0 (chr-ID scaffold_5; pos 26 585643 to 26588779)
cggcctcccctcgctccgattcttcatcgacgacggtaccgcttctctctcgcgcgctcgctcatgaattggcccgtgattaagttctacagttgggctcggatcagtgacgattgctggatgtagaaatagggggaaatgttgcggtgccttacaattcgttgtttatacagattgtggcgcgtaagtactcatactcgcatggtttctgttgtggtgcactatgtctgtgatttgcagttttaccaatttgccattagccgattacagatgcatgaagccttgggtagttgggttattgcgtgcttgggaagaattggcatggtttctgacattatgcgctttatttctcgtccctgcaagcttgttttatagaatcccattatattctcggtgaatggtgatatgctaatattacttgccttaggtgatggtgcatgtttgtagcttgagtctttcagcagataccacctgacttgtttgtcctataccttggtgcaatattttgaatatgttaccaccaaggtgaatgatttgtgcgtgcctcaggttcactaatgagtatgtgctggacaaatgagtgtttagtgcccgtgcttttgtctgtgtgattcacaagcggtagcacttctaaatctgtgttattctgtttatgtcaaaagtaagatcagtggctgatcatctttttctcaagaaaagttgtgcttgtagtttggtcattcgtgtgcattgaagtgcatatagtttgtattcaccatttggattttatggtatgacttttgtaccatgaattttgttcggtagtagaaagcaaagattggtacagtgcacagttggatgtggaatcatcgaaagccaaaaattgggattgggtgcaagttgagaacttctcgcagcttataaagatatgttatgttgaatgtgctggacaaacaaatgtttaatgcttttgctgtgtctttatgattcgcaagcagtagggcttctaaaaatctgttttaaattagatctgtaccaccaaaagattcacactctagaaaaataccattaaaagtttgagttctagaaaactaccattgaaaggttgctccgttaaagaattttaccatcccgttaacttcgtccgtttctttgcgctcggtattgtgtatcaattctctatctagcgatctcccattccctcctttaccatcgctgcttccttcccggagtccagtgctgtccaccccatcttccctctcgtcctccttttgcatagctcccccaggccccgacccttcctctcaactctcaagaactcctatgagcactggattgatgaatcctgtgaactcctataagcacagttttgaacaggctccgggaacatcaactttatgccaagtttagcaagtgtgaattttggctaaagaaggtagctttccttggacatgttttgtcagaaaaaggcattgaagttgatctagggaaagttaatgatatattggattggaaaccgccaacatttgtccatgaagtgagaagttttcttggaatggccaggtattacagaatgttcattccaaacttttctaagatttccaaaccaataactgaattattgaagaaagaattaaatttggatggaatctagaatgtgaagaagcatttcaaatgctgaagaagttattgaccacagctccagtgctagctcaacctaaccttgagaagcatttcaaactaggttgtgtgcttatgcaagaaggaagggttattgcttatgcttctcgacaattgaagcgacatgaagagcattaccctactcatgatcttgagcttgctgccgtggttcatgccttaaagatatggcgacattaccttctcagaagtgaatgtcatatttgtacggaccacaagagtttgaagtatatcttcactcaatcagatttgaatgaggcaaagaagatggttggaacttattaaagattacaagttggaaatccattaccatccgggtacggctaatgtagtggccgatgctctaagtaggaaagctcaatgccactgcattactgttcaaccaagcctcaagaccttatgcaaagaattggaagatttgaatttggaaatagtaatgcaaggtactcttcagaatattactttgcatgatactttaaaggagcatatagtaaaagctcagaaagaagacaaaggaacgagaattcttcgagatcgggtaagcaaaggtgaagtttcttgtttcacccaagatgagaatggggtactctatttcaagaatagaatagtggtacccaaggacatggatttgaggaaaacaatcctggatgaagcccatctatcaagattttctattcatcctgggaataacaagatgtaccaagatttaaagcaaagattctggtggacaaaggatgtaatgagaaatagcaaagattctggtggacaaagattctgaatgtgatacttgtcaaagggttaaggcagctcatcggtacatcgagaaaaagtggtgcttctagtttgataactcttgtgtataggagcacgcatagcttatatgtaccatttgaattttctgttatgcctttttgttttgttgaatatcaatcgatacttcagtcgtagaacaacaaaggttggtacggtgtgcagttgtatgtggaatcatttggaagcctaaaattgagactgggtgtagctttagaacttctcacagctcataaagatatggttatgttgaattgaatcctagagtttggtagaaagtggtcgagaaatactcaagtgcacggatttccttttgctattctggattgtttacttacacggtgccaaatggtgattgccccttgttatctgctactgatttcctgaaattgggtagaaagtgcctgactgatactgaagtacacaagcattccttttgctatgctggattgtttacttacatggtgctaaactgtgactgttccttgtttcttctgctcctgaaattgtgttgtagtgttaggtgacttgtgatctgggagcagatcaaattattgttgcttttatttccgtgatgagttggaccaccttccgtgtctactaatctgttgcatatcttttcctatttgcagttgagaatcctgctgcta

SEQ ID NO: 14666 - DNA, 2213 bp, Setaria italica
  Intron number 2 from transcript Si007431m (locus Si007431m .g) derived from phytozome v7.0 (chr-ID scaffold_4; pos 12 506650 to 12508862)
gaggttgtcaagagtattcgccgggggaacaaggggttcgtaatctgtaccgcttttactctgttcctggattgtttgttcatccatttgcagccttatggtacatcatatggaaatgagaactaccattcaacattcgcattgatttcacccttttagattcgaagattataaccaattgtgactccaagaaataaattgcagtttcgactgcaaaattatgaaactcccggttgggacttgagaagtgagaacttcatcaacaaagattccgaaagaaattcatcgttcttttgatgaaattggtttttctactgtgatttagtagcttctaactgggaaacatacactaatttggatttttttaaaacctttcttctagaataaactctcaaatcgaaaataccacaacaattggaatattcaaatgatgagtggataagggttatggatttccgattaactttttgaactttcatatcaaaactgaggacacattatcctaaagaaagctgtgttttgaggtttgttcaatgggaatgagggtttgtggctgtgatcgctgcagcagacttttatggtaacttggcaacagtgctttttctttgttggataaggagccatgcacatgtttttttttctaataaaccttttctaagcgatggtaggttagggaggatggagaggcaatgtagtcagagacacatgttttttccttctatgggaggaagcgaagaagagaatcaaatgaggcaacacctcacgctgcaatgttgctttgcattaggcccacctgtcaatctcttgactttgtggagactcctgctcaaataagctgacactagttagcatttgtgtttatctgtctagcaatccactctactgttaagataatccgacagttggaagatgctttggcacgaacaagaagtgaaagatgccctgcaatcagtcttttctgactaacttaataatgaaaaaaattaggtggagtacaggatagtacatattatgaataggactatggatgcatctttcttccagttttgggccaatataggaatctgtgaatggcccctggttcctacttactctattttgttctgtactctggaatctggagtggtatttgttccaccggttcgaaaacagtgttccactgttcccactagtttgggctggaatctgctaaggcaccacgtgaatccacccagtcactgggtccatatggcatctcagtttcgaatcagcccaagtgcccaatggggtttttaaaatcggtaaccggtatgggcagggtcatccgcctagtagtgattagacagaaaaatcagactgattatgcggcaggtagagccacctgtttttgcatacagcctcgtagagctgttttcaaagctctggcccaacccatattctacagcattggatctggtcatgacgaggacacctttttgcattgtggctctgagctctagctgttgcagccaacttacagggaaaagaaaaaaaaagtgaaactggtagcaagcagcacatttacttagcctactggatcttgacatgcctaggatacttgtatggctgtagctgatgcattgtaaaaagaattaaagaaaaaatgacatttacttagcctaactctactttggtaaatacctataatttctcttgtcaaatctaaccaagtagtcacatccataggttttccaacattaaattgttatttatcttaagatatggtgtcaaatttgtagattatcctcttatgcaaaaaaaaagaactatgttatttactacaaatactagtttgttagtatccaaggcatatttttcagttatacaatctactagttaatcacgagagctgttctcctagttggtgagttcactgagtagttagcccaattgatgcggtagttgcgttacctggctaatattagatttactaggacttgtcccttcaccttctgatgccaagcttcatgatattctgttgatcaacttaacttttcctaaaggaaatagtgtaccattctgtcttgatataagtaaattactgttttgcattgatgcattgttgtttgctcattctcaaatacctagtctgaataatttatgttacttgtttgttgacgttttcattaactttcctgtgtgttgctttggtctttgtagattgtgcgtgattgctggcaacatttctcccatcg

SEQ ID NO: 14667 - DNA, 2489 bp, Setaria italica
  Intron number 1 from transcript Si030963m (locus Si030960m .g) derived from phytozome v7.0 (chr-ID scaffold_2; pos 36 731546 to 36734034)
cgcggcaagctcttcgagttctgcagcgggcaaaggtatacgcacgagccagcagcacggcgcgcaggcatctgtgtacgagttggcagtaccgggggtccttggatctcgctggatctggcctccggtgaagcgcggggcgctggcggggacttcgaaggggctcccgagctaactaggggcgtggtttcgcggggatctgggtgagaccgggccgatctgtgagaggcgaagctcgtaggttctgaactggtcatgtgtgatgcgttttcgagggttctgggagtagaaacttggtggatttgtagcggatccggaattagggttttgggtgtctctctggcttgtgggtgtggtgatcttcgtagatctggtgggttttgcacccgggtttatagcacatcgattggtctagagatggcgcgaattcccggttaaattaactgcatatttgcttgggcgagagctagatacttgaatccgggttaaataaggtattttttgctcagattttggcatgttttgctgtgccatctgacaaaggtttaatcgcttggtgacagcttaattagtttgtgcatcacatcagccagttagcgtgttctggtgttcgtgcagggactcagatgagggttcgtagcatgcatgcatccgctagtttattcgcatagatcttttgggacttggtaggaaacagaaaagtttcttgaatctgagtggctgctgttctgatgtagagtctcttgcaaaagtattttttttgtttccacttcatactaaaaagtaaaaaggggtctcatatatatgtatgtttagtaagcttaccataaaaaatgaaggctattgataacttttctttttgtgacaaaagaaggaacatattctaaactagcgtgtatataaacttttcagttgcaattttcttactttgtggttttatggtcatgtcatactttatgcaactaaaacaggtaggtcagtttcttctttgtttgaatgatcgaacatacaataaaaaaccaattagcatggtttgagatcacaacaagtcagcacacaaataaatttcagcatgtaacaaattttagataacttttagctaactgtatctgtcattggctccagaacaagcatttctttttttctaactaatggacacaaaaaaatatggttagtttcgttggtgggcacatgtgcgttctgttccaaatccaaatttgtcctcctctggatccctaggatcaccttgtaattgatatggctctacagaataaaaatgattgttaaaatgaaagaaaaggaaagggtttaccccaagtccagctgctttgataacaattagatgcatattggtttgttacttcatggtactaaaaagtattttgctgaggtgctggtaaatttgtaaatactttccatgatccagcaaacagcaggcaattatgttttttagttacataaatctgtaataaaaaaccttaatttctttctgttgcaaatgtaaagaagataccagagtatgcagtttctacacctgttttgtttttgtaagctgcatgtcaggatctggggatctcttgtgccagacactggatagtgttactttccaacaaatatgcacatcatattttgccactaataatttttgtagaaagaaaaattgcaattttgaatgtaaatataattttgctttacatcaaaccatctacatgtctaacttcattaagaggaaaaatggtaattgattcattttcgaagttgtaattttagcattattgaagtgtatgacggaacagcaatctttgagacctcggtctgtgttgctcgaggacaaggaaaggtacacaagattcctaggattgacctggaagtataacaagagtacaatcagtgacagctttcaattgtcattggttgtgtctcctcacctctctcaccgaattgtcctttcatgtcattgttttgaaaacccatgctgacatgcccgtaaaactctccaaggaaaagctttatcagatgtcccttcagagactatagaattgctgcctagctagtactctagtattttatgctgacagatactcatcgtattctgtagattttgttcccgcgcatcagttttcccctcgaagtctgcaacatggcagaacaactgagattctcgtggtataagggataattgattattctagggtccattgggtgaagccataatatttttttctctcgtgtgctatatattactggcacattactgcgatgaacttgaactatcaatactaagataaatacaaattcttctagatgctttaatttggtttttctttgtgtgcaaccaaaattcttctataattgagagaatcttagtcgcatttgcatttttaccttctcaatcaaatcaccatattttatgtactctgctaactatccatgtcaatttggaacttgtagcagcatcacgaaaacacttgagaggtaccaaaaatcta

SEQ ID NO: 14668 - DNA, 672 bp, Setaria italica
  Intron number 1 from transcript Si034433m (locus Si034428m .g) derived from phytozome v7.0 (chr-ID scaffold_9; pos 17 001321 to 17001992)
agcttggcgagctgggctttctctaggtgggaaaggtgagcgacttgacgggttctttaactgattttgcggtttattttagccttgcctggctggctctttcgctacttttcccctttcgctttattctttgcaatatttgattcacccttttgctttcctttgttttccttgtgcctcttgggttttaaagacacggagcggttgcgaagtctaaatcttgcattcagttggggaattggataggtcgggggtggataggctttgtcggtaggtcctttccggggaaaattccattaagtttcttggaataaatgaggatttacgatccgtagattccgtgtttcgtaaactgctgatgtggagactgattatcttctcgttcttcgtcgtcatgggtaagctggttcgtcttggtggctattgatgcgatgtttgagtttggtaaagttctcttggtttttcttaaaccactgagcccatgtcgcaaactcgcaagtgtgtatcgatgtgttttgtgctgaattgggtgcgagtttgctatctatttgtttgctcatgggtttgttgtagatgaaaagactgatctttgatgtgattgttgtggttagctaccagaaaatggccactaatcttgtatactttatgattggtaggtaatttgaagggggg

SEQ ID NO: 14669 - DNA, 866 bp, Setaria italica
  Intron number 4 from transcript Si030776m (locus Si030776m .g) derived from phytozome v7.0 (chr-ID scaffold_2; pos 46 927793 to 46928658 reverse strand)
ttgttaagcagaatacaaggattccttctggagaggttagtttcatatgttctcaagctagtgttccagttgatatacgagcagtatggacttaattgcaactgttgcattatttaatagtatttataggcaatgttcatcatactactaagatggaactctaaaaccaacatgttcggaatatttgtcatctgcatcctcctccctgttatctgttagaaacaaaaagaaaaaaagattttacaatatactcctgctctgtagagagcactgctggtgtcatgcttaggctgatcaacatttacaggttccatgtcatgcttgaaattttgaaggctatattctgggtttataataattaaagtgctgttcctgtgttatctgcatatataactcttgaaagtcaaaaccaacatgtttggaagagtttagttgtctgcaactctgcatgcttctgccctgaagagtactgcaacctaatgctgctgtattagagacttagagccttggaacatatgcattttgcaaagaacattactattagaaattaataatgccttaatgctacagtttcataaatatgtgcagtattatgatctttactattgaatagtgtgaactgcacaaaaatgctagtcgcatgcttatactgatcttcattttaggttccatgttatgcttctgacctggaaacttatattctggatttaattgttaaagtggtgtttggtagctgtgaatcacagatatattgaaatttccagtaatagaaataggaatcctgatctatgtgatttcattgctgaagtttctgtttcataacataatcaggtctgggttggtaaccctgcaaaattcctaaggaa

SEQ ID NO: 14670 - DNA, 447 bp, Setaria italica
  Intron number 3 from transcript Si021820m (locus Si021820m .g) derived from phytozome v7.0 (chr-ID scaffold_3; pos 14 848072 to 14848518)
ataaggtatggcattgataatctgtgtaactgtgttatgtgaaatgtatgaacatgtttcttgttagttaatctgtgggtttgcttctgtgtttcctatgcaagagtgtatgttttttggacagaaaagcttgcttctatttgctataatatttaattgtattaatttgactaatctccatcccacttctgaatatactacactttctgaagctgtacatgtgtcatgaaaattctcttagtcagattttgtagatcaaactggtgaaacattgtgactttacttcacattcaaatatatgctaacttatagcatgatttttgaaccactattgaatattggaggaaaaaaactatgcttgattctgtaacatttcatataagctggcttaggaattgactaagctaagtccaaaatcatcatacttatgttgtttgattcaggtga

SEQ ID NO: 14671 - DNA, 1789 bp, Setaria italica
  Intron number 1 from transcript Si021571m (locus Si021571m .g) derived from phytozome v7.0 (chr-ID scaffold_3; pos 45 382312 to 45384100)
cgtgcgggctttggctggttccccatctgctgctggtcagtaatcagttcgtcctagcttcttggatgggttcttcccagtcgttgtgagagttggattgatgtttccaatcagatccaaaccttttgtccttcccccctcgcaaccagtcgtggattcgcgtgctgcgcggttgtgcgtaggtccaaatccatttatccattatccatggtctgctaggttgttcgttttcctcgagcgaaagatcgacactagttgacgccccacttggtactggtatgcaattgaggtggggagcgagtgcagttagttttgtttccccaaaattttgggggtttaaggaactgatgagggatttaggccatctttaattctattgttcttgtagattcgttacattctgtgtagggaatttggattagaggtgtggattaaatggttagttatttcgctccagtttcctgtttgctttaggggaatggtttctaacttctcatgtttgacacaatactggaaattatgacagccctggttctattatactgaaatttaaccgtcttgaatactcgttaaaaaacaccctggtttttatggaagatattctgattttttattttaactctaactttagttcctgattgcggataggatagctagaacaccaactgcctattgttttacagttctatgtctaggtcaggtgccctattgccctgtgattttcgttgttggagatccacaattcctcatggaggggtatgtgctagaaatacaactaagtgatggttaaggatctcgcatctactgtttggttgcaatagccaatgtgtttgttgttttatgggagcttgcatcttggtacctctagtgtgctgggaagaattcaaaacttatatagttttccccttttgttgcatcaatccttggtcattctgggccatgcatttcccctactataaaccatgtgctttctgccctacaagatatcttctatacctcctccggttctcttcccaaactctagataatttggagggtaccatttagtcctaattttcatcactaaatacattccttcgtttcaactttccaagaccatttatttattcaagtttggtctatcatgtcagctgcccacttgttttgtcctcccatcttataggtatcttagctccatttgggtttttgattaataaaatataggataaaggtatgttcttgttgcatgccttatcttaccttcaagcagttgcacattgaataatctgcaaaataggagacgatgtgaatcctttatttatattctgcatgtttgtactgaactcttggaacatttgttatttccactctgctttccttccacacttttactggcaatgtgttttcgtttcattttggaaaacttttaccactatggtattcttgatatttcattcttccagctgttgttgttccactggaaggaatggtatctgtagagaactttgcacttattctctggaaagagaactttattcttttaacatcattcctattgcagtacttttagtgctggctgcacgcaacatatttttgtaattattttttttgacaatagggtgttgtgatattagttttatattctctctgcttcatttagcacttatttgttcttacaagaacttgtacaacaatttctggtgattagccattttctatttatgacctatgcaatttttctttgttaatcctgcatcagttttaaaactgaattttctaccatttgttttcttcaggattctgctctccc

SEQ ID NO: 14672 - DNA, 718 bp, Setaria italica
  Intron number 3 from transcript Si032437m (locus Si032437m .g) derived from phytozome v7.0 (chr-ID scaffold_2; pos 14 95465 to 1496182)
tgctgtgtcttcagggaaagttggtgctgaagaaggtatactctgacctcatgtagcaacatccactgaaacacactatgattctgtttattttgataatttataactaaacactaagtatgaagtattcttttcatctgtttacacctgctaatattatgtggaattcctcccttatcaataatttgctcctgtgtgtttgcaaagtaccccaatagttgagtggtagaactaatgtctttaatttcctaagcacctcattcttcaaagtggtttgtttttctcaaaccactttttcgctatcaatagtaaatgagttgctagataatagaaaatactttgagtgctcatatataagctttgtcttgtgggtgcggttcagttatttttcttctagatttgtgtattctgtggtgtccttatcttgtgtacttgaataacgatgctagaataaacagttaggtgtcactggagcactagcttcatttgatcctcatgcaactagctgtctgatcagtgtgcttgcatgggccaacttctactaagatacaattttcctttgtagtttggtgttaatgtgtttgtttcttttaacacacagtccaatactaacagtacctaagctgagctaataatgagtgaattgatggttttgttccatgtattttttttggctctggtagatattgatatagtcctttattaggtgaaagttcaa

SEQ ID NO: 14673 - DNA, 673 bp, Setaria italica
  Intron number 3 from transcript Si016265m (locus Si016265m .g) derived from phytozome v7.0 (chr-ID scaffold_1; pos 13 632055 to 13632727 reverse strand)
tctgatttatttgttaggtaagtaacagaagattagtgtcctttaagctgccaagcataatttttggatcgcctatgttaaccattacatgattaaacagattgaattatgaagtattatttatcaattgaaccaccacttgataaagtttcttagtgttctcagggaatttgaaagtggctctgatgtctgaattgaactttttttctacgtttgctgtttgtttactactccttagttatataaggagtgaacataatgctcagatcaagtttccattgcattttttttagggaccattcaaattttgtcttgtattgctctgtttagtagatttctaataggccatataattagttctgaagtagctaaatgacttgaattaatgacacggcttctgattgtagattggatttcctattgtgaatacagttccaaactttaaattcgaagtttacagtaaactttggtatgcaatgccaatctttctgaattctaaattatatcagctttgtttcttggtcacttcagcattgcagtttcggttaaggaatgctattttttattttattctttgcattttgttctgcatgtttatttgattggactggaagcaacataatttgttttctgactagattggcgaagttttcgaacttaaagaaagaggcat

SEQ ID NO: 14674 - DNA, 2331 bp, Setaria italica
  Intron number 5 from transcript Si002475m (locus Si002473m .g) derived from phytozome v7.0 (chr-ID scaffold_5; pos 46 898544 to 46900874)
ttttggcggtcactgagtagcacacgtgagcagagcagaaaagttttcccgaaaatatgtgctgctacctcataacatgtgcttttgcctgttaattcttgattattgttcaaaagattctacttggattacgtatgaatcggcattttttttctatatcgttacagtctgaaactatgatattgaaaatcctgtgatgatttactactttatctttctctgcgttgggccaacagaaataacaattttgagtccaagaaagttggggtaggctgaaataaatcccaacgagagccaccaacaatagggactaaagtatattttgtagagaattgttcctttttttcagatctaatgcaatgaacattattggacacataataatttcacattagtattactgcagaaggaatgtatacttgtttccccatctgcttttgaaattagtgaagttatgtgaaagtaaaataggaaggccatgccgattgctacgctgtcttcaccatgatttttcccaaactagcaatctggatccattcgcccttctccaacttcagttttctatgctacaaaatgcgagtcttctttagccaaatatcccttctgttaccacctactcttatcagcttttcttttctgattctttctttaatctctattaagtttaaggagcaaaaagctcaaataggacccctttggcattgaaatggtcggttcagattcaggtgctctttcgctgggatttctagatcaaaccaatcaagcaactaagccaacataattttattcgacgactctttctctttcaagattagcaggcatgtggccctgtttgttcttttgttctttatacaccaactagtatatatggttcctgtcagggtaaagaaaaaaaaaagaattggttagattgctgccctccagtccctattgacttccataaactgggtcctgagatttattgaaaggttgtgaattgttcagtcaccttgaatcagtgctcaaaggcatcgccttaggcgtccgaggggacccagttcactttggggaacagttactccttgtcgcctaggtgccacctaggagataggcgtacacagctagctttgggtcaccttgtcgcctttgaaacacttccttgaattgttggtgattggtgcaaagtaggattagactgaacttaatgggagttatttagtattatctcagattctcagtgtcaaatgtcatgtggaaacaatactactgaccgaggtgccggtgtgcgtgcagtgcttgccaagatccccagctgtccacagctggccatccagagctgcaaggctctatgttttatccgatcaacaagttaggatttgtcatggttgttaggggttagttcagatttgctagtttgttgagaggaatttttaggagtcttgttagtaagctcttttatgacttaggaggggttcctcatccacactcatcgcatgaccacttcttgtgttcgctgctctcttccattactattgacacaaaacaattggctatttcatatgccactccaggctggtttggccagaaacgagttggttcctgtaatttttctgaaatttgcagcctggttcaaatcgtatcgttgccatctgcacacagcgatgaactcatgttagcttgattaaggacagattggacagcatatagttgtaaaaactaaaaagcaaataaaattaggaggttgttaagatagtgaatcagttccaagttcgaaaccttcaattctcacctaagtttctgtttattttgaagaaacatattctttattgtggtgaaagtataaatattaaccagttctgtattacttgtaaagatttggtggaagaacatcttgttgggatgcttggatctgcaatccagctattttctatgttgactttcatgatgcagttattcttacaagctgaaactaccttttcttttggcaaattacgcatgtgaacgaattttcctcttttttttctttcatacgttcggctttcccatttgtaatttctcatattgtatcctttgtcctaacttgagcggtttgaaagcaaagggaggatgaattattcgtttgtccttgctgcattgctcccttggggtgtgagcaattgtggattccagcatctatcttccttagaatatcagcttgtgtggcgaataagcaagtgctataaatatccccttaagattattttttccattcatgaaaccttaaaaaaatgcctgatcttttctggggtaaatattagtatggtgctctgctcaacctcagaggaaatttttttgttgttgtgaatcatgcag

SEQ ID NO: 14675 - DNA, 1171 bp, Setaria italica
  Intron number 2 from transcript Si031318m (locus Si031315m .g) derived from phytozome v7.0 (chr-ID scaffold_2; pos 10 700031 to 10701201 reverse strand)
ttctactacctgcatttcaacaatttattagcaaggttcatatactgttcctgtatatgtttggaaaagttagatgatattagtttgaaattgatcccaggaaatgttgtttgtttatacccatcaggatcatgtctctccagctcttattttgcctttctatttacccctttgactgtgtcctgtaaaataagatgtcatttttatctgtttggctggctaattcaaatttcagtatttattagtggagtaattattgtagaatcacaccttttttagtcatatactcatattagctgaaaactgtgggattgatggcttctggcatataacactttgttcaatttttggtttgtttctgatcacctatcataaccaattctagccaaagctgacaggtaggtccccggtcccctcctataacgtcactccgtgctgttggtctatccaccttttgcatgctaacaataagaacactgctcatcagcagcatgccaattgacatgtgatcccaaagtgtattggtttgcttggggttttatggaaagccatatgacattatgattatagtctgtcaatcttgaaaaccccacattatatgccacaagctacaaaatctggtattttcttcagcagcaactataaactgtaggattctctgaaacgtaatcttattactcgtactacgtcgaagcactctaattggcaaaggtttgctttacagcacacttacatatgtgcctcttctgtaaatttacagctacagcacaaacactttgcctgaatctgaaagcgaggaaaaacagaggattgtaatacttactatgtcttgttgagttgatagcatataaaccagatccacaagggttagtcagcatgaaatgttgggttataccacaagtactctaaaactgctgatactagacatgctcgaagcatgtagcttctatattcagtttaaacctcagctgcagtgttgtagccaaagggacacataaaccttctgtctatgctataacaaaatcactgcaatattcagtatcaactacacggaggaatgactacttttgatgctatcgtgttcttgtattatttttcttgatttactttttaaaattctgctctaatcattgcagtctgtggcacttggagaaattttttgggttcaggc

SEQ ID NO: 14676 - DNA, 2216 bp, Setaria italica
  Intron number 1 from transcript Si009630m (locus Si009630m .g) derived from phytozome v7.0 (chr-ID scaffold_7; pos 13 105284 to 13107499)
cggtgcgggcctcgccggcgctgctcggcacgcaggtatgcctctctgtcctccttgatccggatgctttctgcgtgtgctgtcccggcgtgcttggactgtatatgtgtcttcttgcatgttcggcccgtcgcctgccatccatggattcttcgcatttgcatctaaacagaaaagaaaatcgtccgttccgtttgttagaggaagaatcgtatggaaaccatctgacaaatatacctagctagctcctggccccatctatatatccaagaagaaaaaaacattcagcaactgtcatatatactctcgatcgttagcttctgggaggatctcgtgagcgcaaagcaatgcaagaccttcctttgagtacacttgatctcaagccagagcggcggcggcgttagtttccagtgacccgccgccgaggggcaaggagttgagagcgagaggcaagctttttgtcgaggtcatctcaagtcaaattatgtggagtcaaacgcaggccgactaaaaaaaatgcatctccagactgacaaattattcctgggcgcatgtcacatccgcggtgtgccgtcagaaagtctcagcgaatattcccgccgcatgcatcaagtatcgcctctccatgtgttcatactttagtttttcaaaaatgtgttcatacttttagttaattattgttggagcgagaagagtttatataattaaatataagaaattaacagtagagattttttgtagttttgcctctagcttgttcctaattaatttggacaactgcaattaaaaaaaaagcctagatattcctaaatggttgcctggttctaccttctagtggagaaatgtagcatgcagtaaagcttaggttttaccgtacggtagtgacattgtggatctgcagttagcgaaagattccactagtcagcaagacgctgcttgagccaataaacttccaatcaaggcctaagttctgaaaaaaaaaactcggttcagatagctgttccttatgtaaattcaaacgtgttctcactttactgtcttttatcgtttatacattgcgcgaattgcaacaaaaactaacttctacttacaggagccacccttactacccaacaaatagccaatatacatcattgttctaaaatggcaacgataattagtacaaaatatgaatattgtcacgtatggattgataccattagtagacatctttaatattgtgaaccccaagccagctcagcagctgcccttctctgaccatcgattctgacatggctgaccctctgttttgggttgcgctgcttcgttctcaccctttgacgattgccacaaggacaaggtgtttcttgacggaggcatcttttctggggatggaacggagtaacatcatttgctatagggtcagaattcagcattagataatccatgcgtggccgaaaaattcggtggtggaccatgggtatcccaatgcagacgatatcttggaccaaattgagctgcagaattgcacctctccctgattctagcttgtttgtccatactcgttcattcaaatgtggtcacatggatgtctgttcccacgcattctgataataataataatggagtaatatgcctggactcacatatgcagcatatgccattgctatcattctggtttcacactacttgtcaatgagaaattacgtaatgtttaacggatgataattataactatatttcaaataggaaccttttttgctgttcccgtaaaactgttttcttaagttctctaattcaagaggagtggcctttttcgttcaattgatttaaggctttaaattttacatgggtcgtacataaatgatgggaaccacatcttagtgtggaggcgttgcatatgcctttgtttactaggtttcaaattatggtgtccacgacatccacgtgattgtctaagtgtggtatgtatgcgtgtgtagtggtgtatgtgcgcgtgcatcactatgtagaaaaataaacaacggtgtgtatagcattcttttctattttagataaaatgtattttagtacattacaacaataggaatttaccacaccaacattcaaaaatgaatttgcggaacatatcagtagatcaaaatactactatttatttcgttgctgtgtgaaaaaagaagtctgacaatgttatcaacacagggtgaagatacagcttgggtaactgtagattttgt

SEQ ID NO: 14677 - DNA, 1313 bp, Setaria italica
  Intron number 1 from transcript Si020903m (locus Si020904m .g) derived from phytozome v7.0 (chr-ID scaffold_20; pos 5 1610 to 52922)
acatatcgtctctcagatcgggaggcgaaaccaaggtgactgacctcatcccctttctcctccctccgtctctggttgctatagctttgtcatccatgcgctgtccttatagctgattagtatttttactagtggagttcgagtcgttttggttccattcagtagtgcttgtgttgattggattgaatcggaggattcgaagtggtttgtgctgctcgaatcgtaagtttgttgggctaatctcgatggaatttatgtcaattcgttggtttagtggtccttggcagttctctctgtgataggcccgtccgatctgtagagatgcggtggaatcctggtttactcaaaacggttctagattcctctgttcttcccttattttttgtttcgattacttagtttgcacgttaggggcctatgaagtttatgtgctcggatcctttagtgaaactgatctgtttacttagatgtgctcggatccttcagtgaaactgatctgtttactcagatctgctggtagctaacaggttcagggtagttatgttgatggtctagttttggtagtttcattgtcgatttctgtccatttttgtgatgttctgtccataaaaatactatctgtgcttcttcatatcttgtaatatgaattcatttgacaaactatgcatttcttttagagtgtttgtctaaattaatcttctggtgtttccctatgccagtctgttaatatgtctgtattatagtgttttgtttgaagtggtaatgtacatggtgcaccctgcagtttttcatgtctaatattggatctccttgtttgctgtatgtattaaggattagtttcacttctaatagcttactgctgatgctttcttgtttgtgtaatatgctgtgtaatcatgttgaccctgaggtttgtaagaattcctcttatttgattattgcatggattagtgtcctgaaggatgtggctcctttgtacaattaagataattcacttttttttttctcaacttttatatgcttactagcccattaggttgtgtaaacattagagtgctttagcctggtaaagatgagttaagcattttaaataaatttttggatttggttgatatcatccttaacacctgcatttaaacaatttgtctcttttgatcctgactattacagtgggtgttactttctttagtcattctgtggtatcaaagtttctggtgtagttgtgtaattatggttttggttggattcttactagtattttctacctttaaacagcaggaaattatatacatatttgtagtgtgatcttcata

SEQ ID NO: 14678 - DNA, 1844 bp, Setaria italica
  Intron number 3 from transcript Si037475m (locus Si037475m .g) derived from phytozome v7.0 (chr-ID scaffold_9; pos 47 627446 to 47629289)
tgccactgttgcaggattcattctgttcagaggtatacttctggttttcatttggaaccttattgctatttgtttgttgtgtatctgcatgggaaatggtcaggagaagctatggttcatgaattatagtttttttaaacatctcatgtggaaaacgccagttttattttgtgttttcagtaggaagttgaatggaaaaatggggattggtactgttatatattgaatgagaataacatgatctggcaaatcctgaaaccagacaacaaggtgccagttttggcatcccagtttggcaccctggtcatccatggaccatgggtgtccgggcactagtacaatactactatcatactatgtctacgctagttgctaacataaagagatgtagagagaaaaagatgtagcattggtaaagctgctaattttcagagcattgaactggtgcattgttctctggagctgagtccagggtaccatcctttagagaatggagcctatgtgttatttgctatttgattggaactattatattcttttaccatggattaattggttttggaataaatttttagctgctggaatcctgttttaattggtagtaaatgtctcctgttagctgtcttttatgttaataaatagttatagatcttatctacacttgttaggacttacgatcctttaaattcagagtaagtttttgtagtactttcgcacaatatttgaggtttggaagtgtactactgtgtagtagtagctgtagcatcccagttttcctgtcaggggcttaaacctttgaacttgtttggggagacatccatacatggacaaggacaaatgactaaagaaaactataaagcttggcacccaattattattctggagtgaaaaaggagagatgcatgttcttttgtttcagacattgatactgtctctgatatgaacctctagtgactaagtttggacttctggtatttccttatgattatgtccaaatggattctagaacatcatttttttaatgttgagactagtttctttgagctaaaaatgcaaaaccttacggattagatgcattatcggccgctatgagaagattggcttcaattgcagttgcaatatgtaactgcttgctactgatcgtgtttgtaatatcatactatactatgttttatcctgaagcaatcaaattgtgctgtgaagctctatttctttgccttttccattgacatgtttcgttgattcaagtgtctaccatgctcatgctgtatgggcctcctaggtagctcctaatggtggctgattgattatagcttagttaccagagaattgtgaatacactcgagtagtcgggttattatgtacacatttatcactccattggaggtaaagtgggatcggtccaagaacaagtcaagaccaaccaggtgtatctggcactatcttatttgctcatctcagactcagttggctaattccttgtctgaccttggcaaattgtagaatcaaagagtttaacttcctttggacaaaacttttaatgaaattgccaagcagacataccacttgaaacccatcacaatcatgagcattgacaaaggtacaaaccaaaacatgcttatgaacagcaattactaacaggcattgaacttatgaaaaaacaattttgtaacactatgtctgtatgtgtagtatttcctgtgagtagttcctctaataattacacaaaggtgccatctgtttggcaatgatttgcatacttttttttgttgggtctcaaaccttgatactgatggattttggcatcaggtcctcggagatttttataccgcaatacctttggg

SEQ ID NO: 14679 - DNA, 3056 bp, Setaria italica
  Intron number 6 from transcript Si009318m (locus Si009318m .g) derived from phytozome v7.0 (chr-ID scaffold_7; pos 13 747251 to 13750306 reverse strand)
tacacgcgggaggagatcctcggaaggaactgcaggtgagcggaccccacctgtcagcgacataacaattgtgctacactgctactagtactattcaaacctgccttcctagttcctgccttctccctctgatgttaccaccgcagatacaagcagtttaggaaatcggttttgcgaggtgaaactttgattagccctttctataaaatatattattttaaatagagaaaaaatagtacattataaaataatttttcgtgatgaatccattagcatcaagcttttgttgcaaaatcatttgtgttttcaataatttattgtcatacctgaagatagtttgactcagtataaaccaaaaatttacttttatatatttgcaattaaggggattacatgacaactaatccagtccattcgttctcaaatagatgccattgtaaaatacataagttatttaaaaaataactttgtgtgttaatatgtaccaaaagtgttatcgcttgttgaattgaatgatgaaacacactgctcatttttttttgaaaaaaaaccaatttatttatgaaatttgcagacaccaataatgaattaatccaactaataagagcttgttcggttaacccttcttaaggatatttgtaagggattggctctaatccttttcaattcccgctaaaaccgaacaagtcctaaatcctgaaggagaataaatcctcaattgaaaattttaacttttatcatcatagtagttgaaaagcattcagctcggctgttgagttttagcttttattacctaagacatttcagcattcggttgaaacattttttaaacccatccacccgatattgaaatacaaaggcaaactctaaaactattaaatagatactagggaattcaacaagtgccctctaacttgacagaaatgtcaagcaacaaaattttcatggggtcaatcgatccacttcatcaaaactttggcttcctctttcttcgtccatttcacattgccaatgtgggggtgttgaaccgatcaatggctaggactaggacagttgagcacgacgaaattaaaggttatggtaatgccaacatacattcttaatgaaagcaataaagtttgtgagaaaatcaggtatggagaaggccaagtccagtagctgtggctgagaatgaagcacttgtctccctcagcaaagtaggaacttggcaaatcctccggatggtgagaaaaggtccaaggatgccttatcttgccataaatccaaatcaaatggttaattgcatcataacacaaaagtccttgacgcccctatgatttgacaagcggtttgatcctcgtgcctaatacaacatccaaaagcctgcaaggaaaaggtatatgttatcctctcgagagcttggtagagaaaatgaggttatttttggatcgacttaacttaattcttatacctattcttttattattctattttggatccaaagaagaagaataaaatccatagaagctcctaactaaaaatgcgatttctaaagattttgttgtaattcttcgaattctctaacgaatctaatataatacaaaaattttgaaattcgtaaattaagtaataaaaaatagagaaataattaatgaatacaatccttatccatcttttctttctttttgcttcatatataaaaaagaattcaaaaaggaaaatttttgtcatgccactcgcataggcataactagaattaaaaaaaaagaatgacaaagcatctgggaataaatgattgattgatataggcttgacaggagcagaaatgtggataaggggatactcaattgggtgaaagaccatgagaattcaaagaattgtgtgtgaactggaaatggtatccttttgtaacttcaactacaactgttaatttcatccagaggatcaagtcataggcaaggctatcacttaccaactctagtcccaggtctttgctttcctaataatgagcattcttaagactaacaagaattttgaaagtttctctgaaagaaaatcgttagcgcaagagaaactacatgccttgttaggccttctccaatggttgagttagtgcactagcttaaaagttgtccacctcatataagaggtggtaaaaagattgtctccctaataatttgtctaatggcaagttgctcaaactatcttgtcccgcaacacctctctcaccaataaagtgtgcagcccacttcccctctatgagctaactcttgaagcttgaagaagagataatgcactcttttttctcaccttctctctctttcacgtaagcaaagtcatgaggtgatttcctgtaagctaattgaggtggccttgctggaggaggctttatggattactttcttctccaaagcaacttgtcagaaaataaccctcatgacatttttggcttctaattagtgagtggcttttgcctcgccaataatcgcctaaaaagatgtgaccttttggcttctaattattgaacaatggttggtcgactcgggccaagatttaggcccaagctcatctatccggctgaagtccagaacccaacggcccatcagccctttctcgccgggtttctctggtgaggccgccgcctcagtgcctcaatgccggcggcggtcgcccgcgacggcgcggcgacgtccgtccgacccccggctatgggccatgtatgtgcatcactgcttccaccacctccgaccccggattcgatgggcacgactcacgagcccccgccgttctctttgtcgcggcggccgccacggccgtggcgcaagggtaacggctgccccctggtgccggggagcgagttctctccgccgttctcgccgcgcgttccgtcagatgttcccgtgctatggtgcgtgttctacgaatacgcgcgcctctgcatttgtgctccgctgccttcccagtgattttatttttgtagaaacacattcctatgttctactgctttggttttgagtggattagtgaagtgatttcatcctgatgtctgcagatttcttcaagggccggagaccgac

SEQ ID NO: 14680 - DNA, 3521 bp, Setaria italica
  Intron number 1 from transcript Si031260m (locus Si031260m .g) derived from phytozome v7.0 (chr-ID scaffold_2; pos 50 67928 to 5071448 reverse strand)
gcttccttcagcagtactgattctcttgcttattttgttgattacacatgggcaatagtgtacaaattatgctgtgaaaccttaattagagcaatcaaccatgttataaggattctgttggcatcgatgtttttcatttcatttttttgcattaacagtgagttagattgatcatgttgtgtatggatattcatttgcccaggggcactgcttgcgtttgcaatggtataccatgaattgcatctcgttgtgccaggttgcatttcttaatgctacatttgggaagatgccatgccattcatgataaagaccatataaacttatttttcttgtttggtgagttcacacggttttatgggtaaattagctatgcgttgggaataggaatgtatatcacaatatatatgcttgtttcttgagtccattgtttgtgcatacacaatgagtctggtcaggtgttgcggtatgaattgtcaaattttttttaatcttgcatatgaataatcttacactctttcatgctacacacaaaactggacatttttcctgtagatttactgattaggtaaatgtaactcaatgaaaatttgcccataggctgatggttgtattaaaatgcctaatattttgttaatcataatttatgttttatgatttatggaaatggcattattagttgttgatgatatggaggttttcaattctgtttcactagtttaagaagtgaaagttggcaacatatgtgccatatgatcatctttaaaattgtttctactggtagtgttgtccattcctatttgatcttcctagtccgactcatctgtctattggcaattggcatttagtaaatagggccattgatgattaactattttacaatttgcgatcatgttgatcttcgtgaagtctggaaattgacccgcacaaggggaattcaccacccactgccgtgtccgcattttttttatctaccatgttcaccttctttatccattcattagtagtcacagaaatgtctgaaaaagttactattatgtaaattgattctgaatgtgctgctatattcacttgcgttatatagtacaggaaatcaagttactggcatctcagactaaatgactaatatagagcttcttgctgaattcttgtagtggcttgatagatagcagttgctaaattggaatcgattaattgaactatgaatattggttggtaaatggctaaatgtgaaatataggtgctgcatctatcagctaattgagaacatagtcgccacatatttgcttttatcctggaccatcgtattggctattgccataaactgctgggattcttactttgtcagatctggtcctggtatatcaatgttaaatagagtatttcacctacaaattttcatttctacgaagaaccaaattattctgataactatattgtcgtttgaccaaaattctaagtaatatgatttcatgcccccttaacttgtttgttgcccttggatcttgatttcctcaactgcattgcttttccacataatgcatgcttcaatgctgatacttcgaagttgcattgaacatatacgactatatgttaatgtagatatgataaaaaagaaggtttctggtctaatttgtaggagttaggcattcacaatgtagtgggcgcatctatttagacttggtcattgaacctattaacttggaccgtcgcatgacatgtggcaaaaacctgtcttgaagttaacttccctcagcacaccatcaagtgccagtcacttggtgtgttaacaaagtagggttcgttggtgccatggctacgttgggccgcttcagctaattccgaccagtgatgtggtggatgcactcttgttcttgcttctatgccatccaagttcagattacgtaaagtagatagaaaatcacatgagtctgccaaagcaacacagattacgttagatagtgattacatcagtcagccaaagcaacacaatcatactctttgtgagtaacctgattatgctctatactgggggtattttttagtaggactgcgctatcgcgcaaccggtcgcgtgcgagcagagtgcgcgatccctctcctggatgctacagttagcaaacacgatgtaatcatagtactggtagcgacttgcatgcctctcctaggcactacaggaagcaagacttgcatgcagggacgtcgctatctacgcgacatcaccactgatgtcagcgagttaaattggttgcattctcttcaaatgagcattattcttccatcaaacatctgtttttaaatccgtttgcaccatcgtatttcttgtgacatgatctacaaaaacaagacccatattcaatatgttttgaaactatttttgtgcaactgtcaacttatattgtattcatgcagtaacttatattcaaacggtatagcactttacaatatatgtttagaactagcaagttatcttgtttgttcagtagaaatttgtataaagatatgtagtaccttatgttttgcagtgtaaaaacttatatgtttaatagcatcactacttttgtagaagaatttgcctcaactaattagtatctgtttatatgtagagaagttatgttgctttctatgttatctcaacttatgcagagacaatggaacaacttaatacaggaaaaatatatcaatatatgtaaaggcaaatgtgacaacttatgtagatacataagaaaagtgacaacgccaagtaaaaatatttttgtagcaatttatgtatataatttgtttgtaggtttacatataaattgctacgaacttaatatagaactagctgccacacattccacataagttgctagtacataaaaattattccgaaatatatgcattatggatctagttttatagatcttatagtaaagaacgtaatggtgcaaacggaattggaaacggatacttgagaaaaaagatatgagatttttaaaatgaaaaccaaagaaataaacacgtgggcacggcagtccagcaggcgcgcatagggccgcgtgttcgggcaccagcgtgattctgcacgatttagctttttcctttttagtattcataataatactttgaaattctcgtgcacaggaatgcagtcatggcagctgaactgatagccagatgcattagtaactatttgtattgttaattgagaaaccgaatccagtattatcctattcttgaccataatttgtgaatgatgaacactaagtgggttggtcataagtagtgaatatgtgttaaaccttcaaattagacagatatggtttaaggtgggatcccacatgtcgcgacttggagagggttcaaaatggtagactaaaagatccttaatatctgcctccatatctattgttgaaatgtctgctaggattgtttgtacacctaaagtgatttgaggaaatatgcatgccaacatgttttttaaaggatatattcttatcatttgtactcacagtgcagaatgatgttgcagggattggaga

SEQ ID NO: 14681 - DNA, 2466 bp, Setaria italica
  Intron number 6 from transcript Si035248m (locus Si035248m .g) derived from phytozome v7.0 (chr-ID scaffold_9; pos 57 936331 to 57938796)
ggcagtgaccatatctggactatcattcgtagtgtgtaagtacatatctggactatcattcataggtgaagttaaatgttcaattctttcgctcttttatagtatagatagatacggtagtaacaagtgtatatcaattaaacataagtgttaaatgacattgcattgcaaaacataaaaatattcctgtgatcgcctattattctccttaagtctaaatactctccattataagtaacatttgcgtttgctacttttggagttttggttgctggctaactgtttaactatctacgaacaattgaatctttgatgatgacttggcatccacctatatattatgatctgttactctgtcctgccctcctttggagttttagttgattttcttgttggaaagggtcttatttgttgttcctatcaaatattttcagctgagagctttgtctctacagttttgtttgcatcaattagaaaggctgatttctactacacaatccacatcactacatgcaatttgttgcctaggcactaggccttaggatttttaatattctttaggttaaaaaagtagtcgttctcaatcatggaaattgcaaatccattgcccaatctgatgatacttttagtcctgtatctattgcaaacaattagcagtcctatgctaatattctttgttgcataagtactataaatcaatgatttacctatacattctgctttgggcaagttacacatgttgaatacacgtagtgagcaggtttatttcagtggtttagaagttgcctaaccagtgctgaaagctctcgcacaaggtgagggtgaggggtgggggctctttgtctgggaaagtaacgtaacctaggtgattggaaatccctacttattcactagtagttaagtagtctctgatacagacattactgtcacaacagatactggattctgataatagcaaccttcatcttgtttgtatatccccttctctgttgtggtcccttgtagatgtgatatatagcgactccaggagtacttatttacttacataagagttacactctgcaactagcagtcctagaacagtaacaaatccttttagtgccaagcaagttgggtaggctaagtagcagctctacagggtaaaaatactattgcgtgatatggcagagattctagctttttctacatgtcaatactaaatttctggaacttacaaaattttgatgagaaggttgttatacgtaatgttctcatgataataagttggtcgtgatgggactagtaagtcctttttgaaggcaatggctgtgtggtgttcttacataacgacagaaggattggctagttgagctgctgaggtggtccttgcctccttggtacttagtacttagtagtttgttccatgactatgctgtaaaaatgcaatttcctgtgatctaagaaaataagatacggacaagtcaaagcttgtccaaaagttgtgtttctgaggatcttcggaatcaatagtagctgcagggtgttctcttgtattgtatgccatgccctacactattacggtgggttttttttttctgttgctgctgtttctcttttggtggcaaatttctgtaatagttgttttctttttagaaatcgtgacttgttaattaaaggttctatcacgtgattttgcaacgtcccctctttatagatcacctttaattagaggtagagccaagcctgctgagtacctagaacaccattggatgattgttctacaagcacgtgatggagatattgtgactttgactggttaaactcacaacattctcagcagaaatagttgattcttgagtaaataagcaggtcaccgtaatttctcgagcagctgtgcacgttttttggacatgtaacttccagaaactggaatactattgccaattctctcatgaacaggtgtcacagacataaagatacccatgcagccaataggtacaaatattgtgcttgatggacaaaataagaagaaaacaatagaatatatgattctttatacgagacactaagttaaagtagttttttgaagtatttcttacattgagctacttataactgactaaaatccattttggtcaaagctattttgaagcttacacctgttttcatcagaccgtaataaactcgcatcataaaccactgtagtagttcaacagattcggactagaaattgtttttgagttaactgaaatccttattcatggaactgtagcattgttcaggtcgtcagatctttcccttttttccttgtcacatcatctgcctattaaatagcaattaaataactgatgatgacactgtccttatgctgttgaatatgtcactttcagatgcattgtatgctcactctcccttataagtaacatttgcgttcgctacttctatttttttttgtcttgcagtgattgtgatagaggtatctgtgga

SEQ ID NO: 14682 - DNA, 1597 bp, Setaria italica
  Intron number 6 from transcript Si022481m (locus Si022481m .g) derived from phytozome v7.0 (chr-ID scaffold_3; pos 51 89635 to 5191231 reverse strand)
aacttcttcgcaagcgagataatcctgagtacaaggttgtatcttcctatttcctaaaccaccctatgaacgagcctcattactttttgtttgctaagatttctatgtgaagcttgctgatgtgaaagaggaattagaatacatgcaactatgaaaggaccagaaaatatcttaagtttcgatgaataccttctgtttaagttcaatttgacagtagttttgagctactagatatttcatttgttaggttgttgtaccttgtccgtttcttttatgcaccatgtttaggtttgtgttctaaagcatgtttgtgatgaaattagattactacaaatctttatgtgatgctaagtgctagctgtatgcttggtactttttttttttttttgggggggggggggggttactatttcttgtataagcagttctttaatagtttaaacattccctactttcaaagacgtggcgcactttacggtgcttgtccatatgctggtctatctcaagctttaaacagtagccactgccaaggttgcttacactgtttttgcctcagtttttgtattcactatatacatccttggcacatttgatgtctgaattgtaataagaagtctagcttggatcggaggaaaagcttgtttttgtacctttgagttttccctttagatgaacacggttcaagttcacatacttatttacttgtccagcagtaacatgcttgccattcaagtgtaactagtcatttgaggagaaggttttaggtttccttcttattttaggttagattgaccatcagtgatttacaatgtctatccaacaataagtagttgtggcagtgcagtttccacttctttctttggctgtggttaatgttcttctggcagcagcagtgttgttctcaactccttggtcgcgcttctgtggttctaccattactcattctgctgttttcaatttcgtttcccttggagatgggactcaagaaacataatgccttggatgggatttgtagtctggaaacttggggctggatgtaactgatgcctgatttgttgaggcttctacccactctttgtttgtacaccggaagtcactgctaggcttccaaagttgttcatgggccttttactagaaaccatccaaacctgtaaaacaactcaaacataataacctgcgtgctgattcctctcctcctcaacttgttgaaaactagcccaatccacccattctgttccacttgcagctttgacagaaaaaccaggcgtgtctttgtaaacccagctgtgttctgtcctcgtatgaattcagcctgaatgcaatgaaggatttatgatgctatctactggtttgaagtgacaattcccatgcatttccagtcatcatgagatgtgtcacaatggttatgccaagtagcttccatctctgtttcataatactttgaaatcagttttttttttcatcatcgatttgatcatttgctatggcatctgtatgagaccatcactgtttatgcaatatatgttacctatctgttcatgtaatttatgatactgtaaaaataactgctgttccttttctttagtatacaattgca

SEQ ID NO: 14683 - DNA, 1901 bp, Setaria italica
  Intron number 1 from transcript Si021910m (locus Si021910m .g) derived from phytozome v7.0 (chr-ID scaffold_3; pos 25 592836 to 25594736)
gaggacctgtcggctacctcgcctggaaggtaacttgcagttcctacccgtttcaatttgtgcttgtcgtgtcttaataaacattcaaatttgtgcaattgttagtcctgcagtgtagctttgctagtacaaaatgatcaactcttggattttggtcttctaagtgtatgctgaaacaaacaaagatttctgctgttctgaagtttaacgtgatttgtgcttattgcatcatttagttttgatttctaaacagctgcattgggttgttgccttgttagtgtaaaacctttgtctttgactgtttgtagattattattgtgcacgtgtatgtcccttcaaaagtttaaagtgatctttgtttgcagcagactcaatcatatcgtagcgtggtcttatcaaatcgtctttggatattctgtatggtactaaaccaattctgttactagttgcaagccatgagctctgctataaaatattcagcatgtatcgtgttgctgattttttgtcattagtttagtcttctctgtcggttgtattagtttttttaatcaacacatgtatcatcctctttactataaaaaaattaatcatgtagaacatgctttccatttaagaatcagaaatttggggtttggtattcagtttgtggctctggaggcctatctttcaatgattaagctattatttaggaagtgagcctagctcaactggttagagtgggaggtgtggtcgtgcactctaaccacctaggttcgagtcccctctagttcgaatttgggtgcctatttcttcttcataattgcctagctcctcctaggttgtttttaaaaaattaagctattatttggagtgccccatggaatttggctatgttctaggattcctgccaattttttgctaaatactgttgccaaatccttcttcctgacaatgtggagtattggttttcatatttggcatactttgtactagaatagttattctgttaaacttagcatgaccagatgttgcacgctgcatggccccttgttatgaaccgaatggatataaagtttggggagctattgtggggcttgcttgtacatatcagggagcttttagcaaaaaatttgacaagttcaatgtttcatggttatttgggtgtaagtgtgtgcccatataccatgttgcaaggtttctggtgtgttgttcctcctgttatataccaatataaggtatcaaatagcaagcccaaatcctctgttttgtagctgcagcttgcagtccatacgatatctatcctcttttctgtacaagtgaccaaaaaaataaaaaactgaagtaaatcaactatagttacccatacaaaggaagccagcggtaacttgttccagaaggctctccaaggattgctgtatacgtattttatacttgccaacagcattttctatgtgatccttcttctcatggtccttgattttgctgaaaaatacctagaagacagaatgaattgcaatgacaaattcatcttgatattagaatattatacagttactagcttagagcatgttctgttatgttttggatattttgttattagtataatggatatctatactttcagtaagacaattttttctttgtctggactgtgtatacgtgaaatttggtggcattagtagcaaggttgcgatgatcgaggatgctaaaaattagatcatatggatggatggcattcatagtataccaattgaacttcagataattgacactactaagttaaaattatgattactgcaaatgtgtttggcattcatttgttccaacatattttagctgcacataaaaaccatatctcatatcaatatgacgcctattaattccggttgttctaaccttttgagatactttttatctgacag

SEQ ID NO: 14684 - DNA, 2086 bp, Setaria italica
  Intron number 1 from transcript Si007269m (locus Si007269m .g) derived from phytozome v7.0 (chr-ID scaffold_4; pos 36 046793 to 36048878 reverse strand)
cggtggacgtcgagcgcatttccttcggaggcaaggttcgggcatccccttgtttcccgtttctttcttccctgctgcagttgatttctgctctccgggaggggaagggcggtggggggcagcgggttgagaggtttcgattggatggccggaaggagccaagttggtaatcttggggtttagcttcgcttcgatttagttccttgcgtggtagggttagcggttccaaaggaagccgcgcttcttgaattttttttcactagctgagcttgcttgttttgggtgcattgtagtattggtttcagattcaagccttgttttcttgtacgatttcagctgccctgtttatagaatcaggtacgggtttatcgtagtttccatttgaagttcggccacctagattgtaattttggggcgcacttgcttctggattcttgttaatttttgctcagaatttggctgtccttcctgttttgccctcttagcgctgccccttccccacatccgtatcgtcgtttgctaccactagcttgccacttgcgttatgcgcctcggtgtatgctgaatcgacagccgtcgtgtagcatcggtgaggtgaaatttttggggctgcgtcctcaagtgggtgttggcctctacctgcctttgcccatgcggatttcttttctctggtatatggtcctcgtttagtaatgtggtcctatgtgagtttgtgtacctggctgattcaattcgagtaatcagttgcctgctttgtgcgtgcttatcgccagaagaaaagaaatcataaagatgtgattttgatgcttttggggtgtagcttgggtgtcctaactgccccttttatttctctataaccaatcgtgttatctctaattgtggaagcgactaggcatttctgcagattgaattgaagcgcaaatctgatggatttaaggtctctttgtgtactggtgctgttctagctttatttgttggttggggaatgcagaatttatacttggtctgtgaaatctaatgcagctgaatctgatcttctatatagttacaaaactgcaatgcaatattttaagataaaaaaaactatcatccttagcttgcacagaagtagttcttgtcaaaatcagtagaaagggagttgggaaagaaagtaggttagtgcagatgggtgaaaaggctatctaagaaaatctgtatggtttgctaatatttgagtctagctaagtttcctatatctaaatcttagtttcatctctcgcacacagatatgtccatagcagcctcctctctatcaagtgtcaactggatcttctcccacagtccaggcccacatatgaccctagcagcctacatggtaaatgtagggttatgatccaatgatttggattgaaattgcactaaggattacttgaaaacctttttactctgttattataaattgctagaaatggattgccaacaaataagaatacgcctacagacaggtctgacctgcgtcaaacttgaccgggcgaaaaggccaacaaaaaggagagaaaagaggtaaggatgggcaaccatatatgatcgttctctttcgaaacctgcttataggccgaagaaagccatcccaatgcatgtgtgcgatggtttggatcagttggccatatgagcaagtgggactaatcccaccacatgaatacatgggctgaaacacttactgagttgtcaactgtgatattacaatagttgtgtcttactggtaaatttcgctacaggaaacctaatattgtggtgtttgctgcacccaaaaactgaggttccgctgatgagcatcctaattcattgctctttgttgacaacactctgtgcactggaatacaaccttattatagtcgtacatgatctttcatttcatactatgcttcatcactattctgttttccccatgacgaattgcttctacagatggcctaataaggattatgaaattgcttttgctaagcccaactataataaatcctggatatattccagcaaccagcatctcacaaactcatcacaatggccagctttgcaaagccgcagcatctgctagactgctact

SEQ ID NO: 14685 - DNA, 2609 bp, Setaria italica
  Intron number 5 from transcript Si002474m (locus Si002473m .g) derived from phytozome v7.0 (chr-ID scaffold_5; pos 46 898544 to 46901152)
ttttggcggtcactgagtagcacacgtgagcagagcagaaaagttttcccgaaaatatgtgctgctacctcataacatgtgcttttgcctgttaattcttgattattgttcaaaagattctacttggattacgtatgaatcggcattttttttctatatcgttacagtctgaaactatgatattgaaaatcctgtgatgatttactactttatctttctctgcgttgggccaacagaaataacaattttgagtccaagaaagttggggtaggctgaaataaatcccaacgagagccaccaacaatagggactaaagtatattttgtagagaattgttcctttttttcagatctaatgcaatgaacattattggacacataataatttcacattagtattactgcagaaggaatgtatacttgtttccccatctgcttttgaaattagtgaagttatgtgaaagtaaaataggaaggccatgccgattgctacgctgtcttcaccatgatttttcccaaactagcaatctggatccattcgcccttctccaacttcagttttctatgctacaaaatgcgagtcttctttagccaaatatcccttctgttaccacctactcttatcagcttttcttttctgattctttctttaatctctattaagtttaaggagcaaaaagctcaaataggacccctttggcattgaaatggtcggttcagattcaggtgctctttcgctgggatttctagatcaaaccaatcaagcaactaagccaacataattttattcgacgactctttctctttcaagattagcaggcatgtggccctgtttgttcttttgttctttatacaccaactagtatatatggttcctgtcagggtaaagaaaaaaaaaagaattggttagattgctgccctccagtccctattgacttccataaactgggtcctgagatttattgaaaggttgtgaattgttcagtcaccttgaatcagtgctcaaaggcatcgccttaggcgtccgaggggacccagttcactttggggaacagttactccttgtcgcctaggtgccacctaggagataggcgtacacagctagctttgggtcaccttgtcgcctttgaaacacttccttgaattgttggtgattggtgcaaagtaggattagactgaacttaatgggagttatttagtattatctcagattctcagtgtcaaatgtcatgtggaaacaatactactgaccgaggtgccggtgtgcgtgcagtgcttgccaagatccccagctgtccacagctggccatccagagctgcaaggctctatgttttatccgatcaacaagttaggatttgtcatggttgttaggggttagttcagatttgctagtttgttgagaggaatttttaggagtcttgttagtaagctcttttatgacttaggaggggttcctcatccacactcatcgcatgaccacttcttgtgttcgctgctctcttccattactattgacacaaaacaattggctatttcatatgccactccaggctggtttggccagaaacgagttggttcctgtaatttttctgaaatttgcagcctggttcaaatcgtatcgttgccatctgcacacagcgatgaactcatgttagcttgattaaggacagattggacagcatatagttgtaaaaactaaaaagcaaataaaattaggaggttgttaagatagtgaatcagttccaagttcgaaaccttcaattctcacctaagtttctgtttattttgaagaaacatattctttattgtggtgaaagtataaatattaaccagttctgtattacttgtaaagatttggtggaagaacatcttgttgggatgcttggatctgcaatccagctattttctatgttgactttcatgatgcagttattcttacaagctgaaactaccttttcttttggcaaattacgcatgtgaacgaattttcctcttttttttctttcatacgttcggctttcccatttgtaatttctcatattgtatcctttgtcctaacttgagcggtttgaaagcaaagggaggatgaattattcgtttgtccttgctgcattgctcccttggggtgtgagcaattgtggattccagcatctatcttccttagaatatcagcttgtgtggcgaataagcaagtgctataaatatccccttaagattattttttccattcatgaaaccttaaaaaaatgcctgatcttttctggggtaaatattagtatggtgctctgctcaacctcagaggaaatttttttgttgttgtgaatcatgcagatgagacttggttaaatccaaacttgcgttgtataaaataaacgcaattggctgaggacacacttctaagtggcgctgctggatatcttctagttatagtataactatttgtatgatcttgtgatttttggtatatgctcttggtcagtatttggtcgttgcttatgcatgatctcagtctctcatcagtcatcacctaaaggcataagctgagtactgcatgtgaaggatcgttgtgttcattacgagtgtcctatttgttctgcagtactgtggcg

SEQ ID NO: 14686 - DNA, 992 bp, Setaria italica
  Intron number 2 from transcript Si000725m (locus Si000725m .g) derived from phytozome v7.0 (chr-ID scaffold_5; pos 29 850519 to 29851510 reverse strand)
ccaattgctccgggctctgaaatacattcacacaggtagggagattgtttcagtcagatctacatggttttgcttggaaaataggttacatgtcatcagaaatgttatcgcgtgctttgcagtaaaattgcatctgaggcattgccttccattagctatttttactgtgcgtcctttcacttatggttggtgtaacctgcattaggcaattgataattcaattatccagtcatctcccatatagtattttacatgataactgccaattttagtttatagctaaaaagattggtttcaatttttcaaatagtgctttcaacaagcttgtagcttcaagtgcccctaggatattaaaggtatactattctttttagtttttatcacattttcatgtgttggaaggaacaataaatcaggtttactaaaaacataaatattttatttcctcgttattttgtatattttttattgaataactaattaactatgattttgcctttttggaagctcagtagccactaactcactacattatgaagatcttgtcttgtagtttagtatagaaagttcgtgcagtcagtaattgaatgaaatgcttaggaagaaattgtagcgtaattaactaatgtcacatggattgttattgcaccctctatggtgttggcttagtaaatctatagtaggctagagatattttaaattccttacaaatccaattttcggtttgagaaactatatcgagtagggtattcataggtctggatccaaagaatagttataaaaatgggttgatgtggcactcttgtgatgacttctttctaactcatctttattatagagaactaagaagatcagatttctaattgttctaacactggctcatttgaaggtgttctattttgctgtaagcaattggtataaataatctgggtagatgctacttttttctgcctacggtctttgctgacagtatgtggatgttactgcagcta

SEQ ID NO: 14687 - DNA, 1439 bp, Setaria italica
  Intron number 2 from transcript Si011345m (locus Si011342m .g) derived from phytozome v7.0 (chr-ID scaffold_7; pos 49 39444 to 4940882)
gctgtgctgtcttctacagagtcagagtttcataggtatattagtatatgtacttcgtgttcacagaattcgattttttttcttctgtttttcatgttctattacatgtccttttaattaatgtaattaccaaacatggccagtacaatgtgtgaaatataaagaataaagacccatattgccaaactgcattatagcaagtagtggccagtggctacattgcaccttttctttttccaaattatcaacatttttaactcatgctggatccgctttgctgacatatacggtttaattgtgtgttttgttccttatagctcagcaattcgtattgtcataggtataggttctcatgtattggtataattaatattttatatctgtttttccatgttctatgacatgtctttttaattaaagtgctaccaaaatggtattgataatttactgaaacatgcatgtaaaatataggacctctgttgacattccatatattttcattgaatttccaggtgcttttttgaaaagaatctttacatgaccaaatatacaatttctccaatgcattagtaacagtcaacctgcaatatcatgcataaatggactctgcacatcaattaacagggcttcggtggcccaatagtaataattctaaacccagtgcactcaataaacactaaatatggaccatgaatcataataccaccaggaactgactgggattggttaaatctattgatttgattatgtgttctagttggaattgattgctctagttggaactgattggatggctgattaagtctacttgtcagttgaactgtttgctgaccttgttacgtgttagattagtcaatacagttccgaataaagttggaatggccgcactgtaaactgagatgattaactgtgaaagtaggaaacagttaggaacccttcgaatgctcaaaattaaaacaggtgcctcggagtaactgtgattttacttgtgccagctcaggccttggcctctggcaggaatcaagaagatacatgatggtgaatagttacaggcttatggcttgtgagagaacatgcatcctccaagctagcatgtattgaggatttgattgtcatgtaggagagacattcatataatcatgtactagtttgtggaagtatgtaaatactaaatagatggaaaagtcctatggaccaccgacaaggtttaggttgaagtctagaatgcaaatgtttcgtaattgcagttaatttagaagactgatgatgtaggacagttgggcgaaatctcactataccaaacactggccagtggccacattgttccacctttcttttctccaaattatcaacatattattaactcatgcttggatctgtcatactgaagctgacttctgtgtttgtttcttgcagctcagcaatccttattgtcagcc

SEQ ID NO: 14688 - DNA, 3328 bp, Setaria italica
  Intron number 1 from transcript Si001079m (locus Si001079m .g) derived from phytozome v7.0 (chr-ID scaffold_5; pos 37 76952 to 3780279)
ctcgacaccaaggtccgtcccccccgtccctccctcccttccttctcgaccttcgcggcctcgcgcgtcgcgctccatttcgcgatctgtgattcggcgttgtttccctggtttgtttgtcgtgccgcctgctccacctaggtttgtacgggccttcgacatcttgcgggttttggagtttcccgtttcagtggttagggttacttcctgtgactgttttaggccgaaatttcggttcccctggtccaactttaagagatcttgaccttagatgtgatctctagttccgaatttcggcgccgccgttctttggacgtttccgtgtgctgttgctcgttcgtgattccttggccgaaatccccgaccattcgtgctggccgaacccgagatgcctttgtctgcttgtgcttgcgtagtctgctaggtgtcgctctttagttactactgcagctacaggttaattcggcttacaccatttaagctgacagttgtggacgaccaattaaagtccttggagatctatgcattaatgtccaccatccagcatttagcttgccttgcctgtgaattttgcaattggatgggttggagccactcgttgtacttaccaacacctgaatcgccattggttggtttgctgttgtcaatttccttgtgctgttggctgtggtcctcatcccacagccacttgtcatggctatgtttcagccataactgaattttgttctgttctggactgtttttgacatggggtgctaaagtgtaaagtgtaaagtctgatagcgttatataattgttgacagtgctgataaataccagaaatcacaatattgttttgagaacttccaatcttttaattggtttgatggaagaaaatgcagatagtgaatcatggtgactaattgagcaaatgaatgatgctagggaagggaaaaaaacccagaattattccatctacttttctgcttttctttgttgattttttatatatcttttgtcatttatgtggctttcttagttatgtgaatggacaagattttagttattgtagatgcatccccctgatgtacgtgcaatctataaaattttctgtcatgttaattttccggcaatgcaatgatatgaactcataagcatcgtatggaatagtaccatactgaattacaaaaaataatttgagtcaatctgtggggctcagtttgccattgcgtgatttagaatctggtacgtagccaaggccctttacaatatcatttagtaatgggcctaacctatttcctgtcatgcttttaggaccgagcaattttccataagatggtgaataaagaagtttgatcattttttacgtttgggtaatggaaaaactaactcatttagccagtgatacttgtataattgtttgtcatctttcagctgcaagatagaaatatgcttgtaaagtcaatttgggctttgtggtatagaatattttataattatggagcacagagggtggttttggactagctggtgaggaactcaaattgaacttcccatatgaccagacctcatttgatcaagatatcagtgggtgattaacatagataacctgttcctgtcttttcttatcatttattaagtgctcttgagcttgatgaaggtaaattggcatctttgatattgttcttttcaccttacactgtccgaagttgcaacctatccataagtcaaccaatacatctcaatccaacttacatacttgctcttctaatctattgtgaacaaatgagtatcaccatcaatctccaatggatttatgtcagcaatcgatcatggtcagatctagggttggggtagccatccacaatcagtgtgtgaccttgcccaatcttgccagctatttttttagctccctttgtgtttaggttaccttgatgaaatttactctgtttctttgccccccttgagggaagatggcctcagttagtagcctagtttctgcatgaaacacggaccagatctgacctgcaaaccctgaggccttattttgtaattgtcattcaggcagtgaaaattatgataaatacaacctatcagttgaattcatcctgtaaatctccttctgacggctgtagggagctgttaactagtgagactctttgctcgatatacttagtgacacatcatattccatccatattgtaaagtgtctaggtactgggcaatgggcatactgtatgtattcagttgtgatatctaactacacatctgcagcacccaatttataccaatttccaccactggaagtgacaatcaggcattagcattagcctgatagttcggatgggaagaaatcatttagctaacagtatttcaactgagtgcagattacgtcatatgacctgctgccccaaccaaattacttttgcccatggacttattctaacaacctatatattgatcctcttaggcagccagtagctttgaacccaaaatgtacattctcgtcattacagatctgacatagtacaacttagaaaagattagcatcaattgatttttaaaatatctgtgattgggttatgaaagttgatccactagtaattttcagaagcaccatttgtggataacatttgtgtagatttagtgtaattaccctctactgctactcaatggctatgttttggattgatgttactgtctgttattgtacttgttttttctattcttaaagcaaagaatatgatcaaacttcagcagtgagtctacacatatgtgtagttaaaggtctgttgtcataccaaaatgtgcctgatttgtatgtggttggttctgcattggtaggtcgtatcactgatgttctttcgtttgtttgtattagctatgatatgtccctttcaaatctaggttacatttagacatgtactgagaactataaggcatcaggacgtgccatccttgtattttgatgtagaaaattgcagtatgcaactatacatggctggatgggttgatagggtgatactgtttgtgatctttttttctttcttaattgggacacacatcttcaattcagcttactgtgaatggtcagcacattctacgatgatatccgctagtgatttttctatgcataatcttagcataagcaacttgctagtctgaaaaggaaacatatctgtcactcttatattgcttgagctgtatgacttgtgtgtagaaacaatagtgggttcacttgtttttttttctttgcacaactgtgccattaatgtatacttgtcatatcttcattgcatctacttatataaatttcagggtccagagatccgaactggatttttgaaag

SEQ ID NO: 14689 - DNA, 2214 bp, Setaria italica
  Intron number 1 from transcript Si030259m (locus Si030259m .g) derived from phytozome v7.0 (chr-ID scaffold_2; pos 30 482565 to 30484778)
cctccaaggccaagcccgccccgccgccctccaaggtgcgatcgcctggcctttactcgttcagtagcaatgtactgtgtatcggttcaggtttcgtgccgtattgagctcactgagatcgctggtgggggtcagaaaattcgctgaataagctcgggctcgtagcgctgttggaacgcgagctgcttctatgggcttttagatctcatgttgttgggtactagtgggtagggactgcgactctgcagctgcgatggtcaatttggatggaggattgctagattccgtgatcttcgagtgtgtgcatagctttcatttgctgaaatatgtggagatgcatgccgatattgaagaaactgtcatgcaagtgcaaatactgaaaattgaatacgtcataccattgatggaacttaggatcttcttaaattcaagtgagtttaaaacactagtgtcaacatacatcatgtgcaaccaccactcagcttagtttgagctatagttttaatgtcttccgttctattgtacatgtagcaagcacttgaaatttcagttgtgaagagggatggagttcttatgatcatggtcagatacccctttatccttagaagagctaagcactaagtttgtgtccagtagactgaaaacctaaaaacataaggctttgctgcctccagttcttaccatcagtcaccatcacacttgtcacaatttatcacgcttgtcaaaatttagggacaatgattttgactttggttcagagtggtggcatacgcatgtagcattttacttacccattatgaacttttggtgattctggttcttgtggcaaaaggagctacacattcacagatctgttacctctaggcagggagtcagggacaacaatacttcttcctagacatttagtagatgttagaaaccttttgaatcctaacatttcaatgtccccgtaacccttatctctatttctctctctccttcctatcattctctctcagaatgacagtgttttcaatcctgtctactgttttttctcttttcatcgcttatctactagtgctcctttaattatttagtttcagactgctacttaatggcctgacgtctacttgatcttgctactttatttttcacaaccattgttgtatgctattgctatatttgcctgtgcatcctacctgttagcctgctagtgaaatgattttcagaatgctaatttagtttcttgctatgtacagctgcgtttatgcataaaatgtacatgatttctgacagagtgagattgttgatttgttggtttactgcttctactatcacaaagaggcagggatttagacataggttggactatatgcacagaaaagcaagatataggaaaccaggcgaatttgccatcccattttccttgttttcttctctcagttcatttctgatagttgcgtcactttctctccactcggtttcaggcgtgttgcaccctgcctctcgtcccatgatatgcatggcctgtacagtgttccccaaattgcagactcctttccttgcccattcatgggattttagttttgccatgtttgcttttctgaaacccaacgtcatcatgaaactgcattttttctagtgcacgctttgaggaaaactgaaatattgattgaattacaaagttttccaacaacttgatcattgactactagttcaatagtccataaacttagaaaatttaagacatgctactatcttaatcttctatcattctatgaagcctagtcatgtgcatacacaattaaccagacagcttggaagttacattaacatggaaacttaacacggtccaatgtgggctgttactttgaacttagtcctattgacaactgggcaaagtcagatcttgaacaataaaacaatgtatatggtgtgtgccaattgttagagtctctctttattatataacaagttctccaatggcttgaaccttgaacattgcttcctgcaaggcaaagacctttttagtttttctttttgaaactgtggaactgtttaccttgtgtactggttagttatcaaattaatgttaatatccttaggatcaaattttagcatcgtggagaaaatatacaacattaaagtttgaagaatgatgtcttgctgaaagatatatcaacaattttgttctgcctgtgctataacattttttatgcgcttacagactgggaa

SEQ ID NO: 14690 - DNA, 1303 bp, Setaria italica
  Intron number 3 from transcript Si037539m (locus Si037539m .g) derived from phytozome v7.0 (chr-ID scaffold_9; pos 56 944708 to 56946010 reverse strand)
aaaaaattacaggtatgtaatccttcaatagttgctatcatcttatttgaacaaatggtaaattggagataatgagttctagttctattgttaataaattaataactgtatcagcataaaaaggttaaatttctgactttatatcctattgtgatttgtgaggcataaattctgaacaaaaataaataagctgtttttcatattcaatggaagcatttctggtttgttattttcgtattttgagactttgatgcatgtggtatgcttgggttgagatgtgattgtggtttaagaataaattttgcaatagtttcgggtcaccaatcaactattaaggtgctacttccgtaagtagtttaacttaataagcagataaaaccttttgtcaaccatgttcaggattacacataaaaaagaattaagcatgaattcttggaaagaaactataaggtgtgaacactcaaaagcattttacataaggggatcttaagcctttatgtacatctcttgcacaggtgatcttaattgtacattgccacctcctaagtgtgttgtttgaccacatacattgttaaattacagaggcatgtcaggaatcaatgcaagctctaattattgtactcacttgtttactttcggtgatgcaggtgattcatctattacttcgagttgatttctgaaggtagataaaattccgtaaacattgtatttattttctctctcatgaattagttttaaattttcagttatcacttagttttctcatttgggactcgaggctacagatctgaatgcttttgcttctaccatttagtccatcttgtttgttgtgtgtagtctgtatgtatggtagcactggtctgctgcaatgttagtggcttagtgccagtctactgtgatattagtgactccatgtcagtctgctgtgattgttagtgggttattgccttttactcaattacatccaggttgcacgatttgttcatttgttgttgttagcttggtataccctcagattcttcatatgttaattttgtagtagcatgaatgctcgtgttgctactgaatgcattaatgtgcttgagttgagcttctcttttctatactggatcatgacctcgtgctcctatttttgttaattctgaaaccctagaggaaattttgcatctgcttggaatgtgggttcttcgttttgtagatgctttataattgtgtttggcccaacgtgggcttttggattcatatatttgtcaatgcacggtcctttactcttttgttctgatctcttttcatttgatgacag

SEQ ID NO: 14691 - DNA, 1761 bp, Setaria italica
  Intron number 1 from transcript Si034843m (locus Si034843m .g) derived from phytozome v7.0 (chr-ID scaffold_9; pos 51 772895 to 51774655)
ggcagagcctcctggtgcgcgcgacggagccggaggtacttcaccaccctttatgtatggagattttgttccttttttcctgattgtttcttccaccacgattcaacaatccctagggtatctttttgtaatcctctttagtttcttcttttggttaagttcagcttgattgcaaatgcttaaattggccagaatcgcgacaggaaggaggaggaaatgatattccgatcgctcagttcctggaattcttggcatcgtagaccttcgaattgtgattggcgtgtgcttttttaattagtgggttgcaaaattgaatagccgtgtggaaggaaaataccaagggaaagggagaagggttcggatttcggctatagaatccggaattcctcatagacgccggataacaattggacaaataggatacgtcttggaatcatggattggatgtgttaggttgcaacacgccacagttttaaggactatagatccattgacttgtggaagtgaaagaaatcaattttttcagaaatttaatttgcttatgagtacaagatatgctgatgttgattttcttgagagctctgatgtttattttaactgttattggatatgtttttcggaagactattgaaacagtgggagtggaatgggctatacatgtttgactgaaatgtgaatgatttagacccgtttatctatttgagtctctgtcattttggttattcaccttcaaacccaccctctgcaaagcaaaacctttagcttttcaatcaaaatattggtcaatgtgctatgaaaaatatacattcgtcaattatagctgcagcaaaattttagaaacagtaaaagaggatatttataattctcaactgttcaaattcaaagtgatgattcacattggaaggcagttaccgaccttatggaccaatttttgttatattgcctttcgagcagcaacaataaaggttctttgaccactttcaggggaaaaaggaaattacatagtgaagggaggttagatgagcaacgaggggaactaaaatttagataagtcatggaatcgaagttaacatcattgctaaaatatataaagagctcacctcgtggagatgtgatatgttttacctcgtggatatataaattctctctactcaatcatgttggaagttctatgtaatctgtttgctcagaatgcacattcattctgaagtaatgatgatttgatctttcaagtttttattaatgatatcctgagacaaatcttggaggaaatctttccatttgatataaagagaaatttctccttgttttgcctcgagtagtccttctaacattagcaacagtggtggaattatctacctatgaacaactgatgaaattttattttgggttgagaagtaactatatatgaaaaatgtagagtcatggacacctaccaaggacacttatgagttgggacagcatctagtgttgatcctgagaactgtcattctccacacattctctgctcaacatcttgtaaaactggttgaggtttgatcatagttgggatgtatgtaaggctgtgattaacataaatgctaattcctacaaaatttatctgctattttttccttttgtttctttcagtagatagtgttctatgttccctttgctttatgattttgatgatgttgtagtaggcacccacctgtaaaacagtttgcgaataaattttaaacaactttactttggcacaggatcttgctgagtacacaggcg

SEQ ID NO: 14692 - DNA, 1591 bp, Setaria italica
  Intron number 4 from transcript Si035098m (locus Si035098m .g) derived from phytozome v7.0 (chr-ID scaffold_9; pos 43 535692 to 43537282 reverse strand)
gaggcaaaagttgttcttccttttagctttgagaagtatgcctgctcttaatttgattttgattatttccacttgtcctcttgcaacttacatttctgcacagaataatgcggtgaaatgattaagagatgactgcagtatttttttgctctcctaattgacaccaccaccaccaaatcctttagtccagagcagtttggggccttgggggtaggccaaagactcagccttactagagccgaatgatataaaatatgaatatagcactagttatgacaatagtagtaaaagcgacttgttcctaggtcattattctggcatgtggatcatacttttcacacacatatctaaaagacttcttcagacacatcccattctttcaagtttctgctgctctaccaaatgaaattgcattaatccagttctgaatcaggaaagtacttcaatcaagttttgcaattgttgctctggaagttaaactgagcactgaagttattctatgatttttcattattgaaactttagccttataaggttcttgttcgaatattttttccgccaacattttaacacgtgtatccacctatgctctggctatcaccgatatgtgtttaactatttccattttgcacaatcaggatgctataagtctggtaaaaaaaaatcatgtcaccagattggttttatcaatattttgaatgcatgataaattatccgcttgaataccttgtatttgctatgttgttggctgctagaacaccatctagttgttggtgaaaggaagccatcttttgagaaaattctacattggtctgtttgcacatttcatcacaaatgacattatgacaaattgcatgatcaacaacattcatcctaacaagcaaagatggagtaaatttgcagatttgggatggctaagcctaaaagttatttatatttctaacactctaaacctggctgatttctcttctgttacatctgcacatgaaccttttttctccttgttgtttaatatagttcggtaagaccctccactactatttcccaaggaaaatggaactattactaggaagttattagaatggacttcaaaaaatattttacgttgtctacgggtgaacatgtaattgcctaattgccattctgttcatgtttacctaaaaataatatgtttagttaaattacataagttaataaacttgacactgttttatgcagatatgcatgtcattgctaagatctgttggtcgtgtgatttgctaagttcgtagcaagattagcttgcaatgctccatgctgcataaatgaactgactcgcaaatagataaattatttatttttcctttatgctgaatgttagagaggtaaaccagccttagataatgaggaacataacctgataactggacctagctaatgtttatttttaccatttggtatgacttgtatcgtagctgttatgaaatgctgcaaggttttagttagcctttatttttatcagatgctgtgttctttcatgttctgattttactcttattgtttattgtttctggcagaccccaatcctcacagcctcctgctatcaaaggtg

SEQ ID NO: 14693 - DNA, 2001 bp, Setaria italica
  Intron number 1 from transcript Si019140m (locus Si019140m .g) derived from phytozome v7.0 (chr-ID scaffold_1; pos 39 676550 to 39678550)
gacgcgctccaggaggccctgcccttcaggtgagcgcccatttcgccacggggaacggatcttgatcggtctcgtgggcttctctacgcgattcttttgggggattcggggcaatgtggctgcaagcggctgttcttgatcccggtgcgctcgtttctcccgggaaatttttggagatttctttgcgttcgctggactaacgcggttgaagagattggttattcgtcagtactaattagggaatgtgcgttacatactcggaatcttggttctctggtgaagtagggaggtcttggagaattcgagcggactagttcggttcttggtcctgtgattgtctctcctgttggaaattggaggggcttcttctcttttcttagcaggtctgagtgatcagatggccagattgttgcgatttagggttctttgcaattctctgtggtgccttatattcactgtggttggggacattaggcttttgtacaataggattctatgcaaacatcacttcacattgcggattctttgatcttataaattttggtccatgaactgcttgattttaacaggtatatagcgtcctgattgatgctaatgtctagtatgtgaatctctcgtgttgcttgtaaagtggtttatgaattgtgaagataaatgtggatacaccatggaaataagttgagacaaattgggattggaataaagtttctcttaggctttccaaggagagttaagtaggtttcagttagaacagcagtaattactctagtacttctccgattaaagcctaatttccaccagcttaatcttcaaaaggttttgtttctttctatttaacagggaaagattatatgtccacttattccttatgggttatggctatgttgcaatctcatatgaatactatcgtttaacttttgccaaatggtactacagtttgctgactaccagcctattgctgggttcatttctactagttgttctgtgtagtgtgtaaacatggttctatcctactagttgttcagtccaaataatatgctacatggcaggattgtgttcttgtgatactactaaaaccttttttgtcttcaaaacatatgcttggattaatgatgaatttttttctgttagccagtaaaacacagctgctatacattacaaatgaatgcaactgcagcagaagtaacactccagccattttacaagttattcacagcactaggcaaatagatcaatagtactggcagtccggatattacttgtttgtttgtgtttccatgaccttactgactggtggttacataggattggaatagctctgattggttgatgcatatactcttggacaggaatcctttgctgtttccttaaactgtcttatgtaatgaattgtttcactgttcgtgtgccgaatcacctgaatgcaatcatctgtttgagcatgttgtcgaacttatttaattgtttattataccactaagtcttgaacacaatgtgattgatcatgtaaaatcataggttcagttccttggccaatgatcatagcactccttagtagcttaatgctactggttggctgttgacacttatggttagcagaaacagtgtattacattcatatgatggaagcagagatttggtcatgtggtggactcccaacactgttcgatgcagacaacaagtgatcaacacaagcacaagatcgagcagacagcacgttcttctttcacatggatttgttggctagcttatagctgctatatagtatttgttacctgcagcactaaaatattgagttttattgtctttgttttggatttggcaacttaactttgtctgtttgttcactgtgagcagcttggagactgctcgcctctgttttgtcattgcatgttctttattggcatttacatgggttattatgataaattaccttttgacatcttatcagccttccattttgctgagcaattttcttcttgcatatggcaggaaaggggt

SEQ ID NO: 14694 - DNA, 1097 bp, Setaria italica
  Intron number 1 from transcript Si022159m (locus Si022159m .g) derived from phytozome v7.0 (chr-ID scaffold_3; pos 40 416408 to 40417504 reverse strand)
atccggacaaggtttcaggtaaacaatcttctctgcttcttgctttgctacccgtttgatctccgaactttcttgaaaggaattagcattacccacatcatgatgacacaactattgtcattatgttcttataattggtttggaaactccatttgacgtagttacctgacgcagtcgcaatcaagtactaatagagcgaaaattttcagctggaatttgtgaatcactttgtaggatggtgcatcctcactagtttttgttggtgcagttacaaccttactgaaacaaaaaattgtttgaaagccgaattgaaagttgagggtcctttgaaatgacagtcacctgaactcttaagttaacgaggagagggagacttcgataatcattatggaatggaattcatgaactttcgtttaaggtttaacccaatatagcaaatgcccgcttgaatcacatgttgctggatgttaactcatttgcaactgttgggcaccgtcaatttcaactgaagtaaaaactgtaatgccaatgcagggcaaatgtcaaatggtcacggtcaaagacattgaccaatgttgcgttcgttgagatgacgtcagaaaggttccgttccagagacaaccgtgcgaggtccatggttaaagggtttggcatggctgtaaccttcaattttagcctctgattcgatgtcagcatatagtcgtacactaaaataaaatcgtttaaatttaatgttcaacctatatttgaagtggaatgagtgaatgactcgatccttgctgtatccttgcttcagttccacggaatactaaagctggagctcttccaaactttccattccacttgatgagtttgatttttttaatatcattttgtgcagtgcacaattagtctacaaagtacaaactaatacttacattaattcgaaggaatcggatcctttctttgtgtatatatgcaaacaaaaatgctcttgttgtcgtcaacaagacaacctgagcctgctgagctctgaaagttttgacacctgccagctgacgtgttctgtgctcaccactgcaggcctggagactcaccgcgtcgtctccatcggcagc

SEQ ID NO: 14695 - DNA, 729 bp, Setaria italica
  Intron number 1 from transcript Si012372m (locus Si012372m .g) derived from phytozome v7.0 (chr-ID scaffold_7; pos 23 449881 to 23450609)
aggaacctctacactctggtaagtccataaccagttcattaatacattgagcagtattaagtttaggaaaaagtaaaccttaagttcaacaaggtgtatttaggggcaatgaaaaaacatatatgtgcaattacacaggatctcttatttgtgacatctgcttttggagttcattccctttagttgttttcagtgcctaaagagcactgaaagcaagaatctcaactttctgtaagttgtaggctcttctttatggattgaaaaagacctctgcacttccattttgtttctgttgtccttatgtttgatagcgttggcacatgtacctgcatcttgtacatggcgctgactagaataaaaactatgccgtcaagaagtacaggaatcttgaataactatgataagatgcggaaatacatgtcacacgccacacggtacgaaagttttcacattttagtagcataatgaagatgccatcatagtaaactactacaagaagtctgaaacagacaaatttaacagcattactgagatttgtttatcctaaaaggctaaaacgcatcaaagttagtagataacttgaatgtccagattgcaggttaaaagaacaatgtctttgtaatcctcagaataaaagataagtaactgtggtacaaatttcaagtaaactgtttcattaagctaagaaaaatatttcctcaaaataacaagctaacttgctactaggtg

SEQ ID NO: 14696 - DNA, 1010 bp, Setaria italica
  Intron number 8 from transcript Si026199m (locus Si026169m .g) derived from phytozome v7.0 (chr-ID scaffold_8; pos 20 536428 to 20537437)
cttcatttgcttggataggccaagatatcctcgtaagataaacttactgctgttcctgttctgtttttttttttccttttttgctatgtttccctgctggtgttgcatgataattttccatacttctcttcagtagcatgtgaatgtactacagtgtaccatcaagcaaaagttcagatcacatagaataacctatttttctcaggcaccagattcgtaactaacatattgtgatttctagtccaatcctaattcagttcttgaattgtcaatttggtcagacatgaaaagatttgcatgtataatgtgcatagtgcaatgaagtgatttttttagaaatatttggtgttcgaagaactttgacatgcaagaatgggtctgcatctttctacaaagtcctctgaagctaccatgtgcaataacataagcatgatgttacagttctgatgtgaatgcatataaatcagttcgactgctggttgctaagcttatagcatatgaagtttatagctttcttacatacatggcccactggacatgtaccttttgcaatggtatacaactcacttttaattcaaatttggtattagagctgaaggaaaatttgtagcaagctccacctttggtggattttccaatcctctgtgactaagaaatcccaatatcatatttagattagagatggagatgtaaagctaaatgttttcagtattatctttatttcgcgctgtttgaatcgggatgaggtgccaaagtttcaaagcttgatatcatgcatgtgtgaaaactcaaaagattgttatttgaactattggatagtatgtctaaagaggagaaactcgtttatgtttacgttcatggttaggccatttttatataaaaaaatccgatgttaaatttattgctatttaccatttgaattcttgcatctttagttctttgtcctttgcaaaaccaactacggattattgaccatgttttttgtttatttctcccagggtatctgtttg

SEQ ID NO: 14697 - DNA, 1187 bp, Setaria italica
  Intron number 4 from transcript Si029981m (locus Si029981m .g) derived from phytozome v7.0 (chr-ID scaffold_2; pos 17 359244 to 17360430)
gtattggtgcagaagcacttcaaaatttccagaaggtagctgagttcccttccttgttctcgagcaatctttgtcattgatggtgatgcacctgtccctgctcgttgcctttcgttggtgctcagcatgaattgcaaaagttggctggagtttctaaaacttcaatttctggttactgcatagtttgtcttttttttttcagcacgtgttttgaattatctggatgaatgaatgaggtaaaggccagaagagctggcatgctatcaaaccactttgcagcaaggtcattaatgtgcaagtgactggcatcctgaaatgtttgcaaatacatgcatgatataatcttttccccgcaaacacagtatgttataatcttattatagtttgttctttcttttctgataagggtgaactccttccttaagtgtagtcttccacactagcagcacctttagttcacatttttttcgcattggatgtcctatcatggttccttattataatagattagtaattcctagtcaggaacctgttccatttcaatgtgatagtttttgtgccttgcacaaggggccattcctgcaagcattataccgagtgatatacatgttaatgtgacaaagaaactgagtgcatatccaaatcttttgtttcaaactttttggtgaaaagaatgcaaacttgatccatcattacaccaactatttgtcaaatattccagtgtgcgcaagggccaagtttaagggcctgtttggtagattctcagtgggagctaactcttagagagaagtgattctgtggctgaaagtgattctctatgattaactttatggagattttttttttcgagaagtgaatcaggaggaagctattttttcagctcccagctcctgaattcatttcagagaatcacttctcagaatcagcagaccctaaaacaatctgagccaccatagaattgggtattcagagctcattctcatataaatatttactgattgatcaattttacttattcaaggtgcatacgttgcaattaattgaactgcattatgctggtttatttttgctttcttttggtttatatattgttatgttaaaaggcagtaaagcttgtatccaacgtgagttgatgttcttgcctttaaacaggaaaatttggtttacaaggaacaatttgaagctgt

SEQ ID NO: 14698 - DNA, 1138 bp, Setaria italica
  Intron number 3 from transcript Si000213m (locus Si000213m .g) derived from phytozome v7.0 (chr-ID scaffold_5; pos 34 326473 to 34327610)
cttattatctcagattcctccaggaatcacaagaggtaagttgaagcatacttgcttatgctttaagcttgaaagatttgtattattaccccctttcctgttagcatgttgtagaagttcccaaaagaaatttattgtaccctctttgttgctatttcttatacaattacttcgaaagattgcacaatcgataggaatattgtacttttttaaaaaatggccctatattcttcattaatcaagctgctttcctgtttaaatagttgccttattggtaagcttagctgctttgtatccatcttgagtacccttgatgtgcattcatcttcagaaatgtcatgttactctgctattgttctagtgtcccttttgtccggcgattggttttcattttttggtcctggttgcttaataaaaaatgaaatcttcaaaattgagatatgtttttgtattgctgttccaatttctgatgggtttgtttttgccaaaagtgccttcttttaccccagagtgcatatgatgtcttacacttgatctctgaacttcaggtaagttcacatgtggaaagtattaatcactgatgcaccacttagcctttttcttctcgtttctgttgatgtcatcacaaactacaaaaatatttatcttaactacaagatcggtcatctatattgtgctgactactgtcttgtgttcacttcaatcattttctttggtttaattgctgctttctgcatctctttgctattgctttgctttttcaagtttataatgtctatttttttaatgttctcccatgtcttatgggacacttgtaacgtggacacccagctcatgatttagtgtagctatgttgtgccatacttgttgaagcactacataagaaatattttctgtttgttttgggaaggttcctcatcttgatggacatgatttgcacaggctattttgtttactagaataattcccttggttaattgttgctttagtgcatctcttttttactttgcttgtcaggttttcaaatgagtattgttttcttttacttaggcaatctatccttttggctacaatcccttcgcaaattttaactgtggtttgtttctctatcttttatttattatgcagtccaagtcac

SEQ ID NO: 14699 - DNA, 1049 bp, Setaria italica
  Intron number 1 from transcript Si021188m (locus Si021188m .g) derived from phytozome v7.0 (chr-ID scaffold_3; pos 25 597953 to 25599001)
attcgtccgggcctggattgatttctcctctgcgcgtaaggaaccctaaccccgctcttattttgctccgatgaatcgcttgttgcggtcatgcgtctagctggtttggctcttcagtgattcagtttgagcatgatcttagttgtcctgtgatgctccttggtgcgtatgccttgtatgtcatgttcgcctggtttattctgtggattttaactgaggcacggtttgtcttagtccaaacactggccatctcctttgttgatgttgccagtaataggcgctctaatgatcatgttgcgtccaagttaggtggattggtgtattcatacaacgtagtgtagttatgtatctttgttctgttgattgatatatatctctgtatatctctgctctctgttgattgatatggctgctgatactattagggtagcgatctgttcacccaataatatatttgtttcgtagtttcttcattgtcatgtggcactgttctacatttcttctattatgaatattgatgctgtgtaatttcttcattacccataggcagtagtgctccatagtgttcctttttctgttattaggttgaaaaatgtttatggtattaatcacctgttcatgttttaagtcatgttagcagagatgtaacatgattatctagatgcttggatcatgtttaccccgcattagctttgtctggcctctcattgcattggttggtttagttgtttaactgataatctttgattgctgacgaggaaagtaatttctacataagaatatgtttgattatcttatgagtatgcgctttagtagtgcttataaaaatttgatatctcacaatcatacagcgcctttgttaaatgatttatctggctaatatttgtggtgtggacaatgttattttgaatgcaaaagctttaagctagatttaattggctcattgatctggtctgtatgtattatgctatttttgttgattttctctgattccttactgactgacaatctgtttccttttggtgcaggatagggcatttgctacaggc

SEQ ID NO: 14700 - DNA, 2112 bp, Setaria italica
  Intron number 2 from transcript Si017898m (locus Si017898m .g) derived from phytozome v7.0 (chr-ID scaffold_1; pos 10 433263 to 10435374 reverse strand)
cattgttgagaataacttctgtgcttctagaagaggtgagcgcacccttgtcatttacttttatgagacttagattcttttggtggcactaagaaagtatggagctagctgaggtcattccatccattaagacattctgttagttttctggaagcattcagtttcctgcccctgtttagtctattctttgtagattgtcatgagatctttcattctctcgccctagaattacagagatcattatcttttccaccagaatggtctattacaatcacctaccatagatatggtttacaagacagtcaaggaggccattagttgatagaataaatatgttgtttcaacatgcacatttggcagttaaccattattagtaagcagaagtttgactggcacagatcctatatttccatcttgagtagctcctgatggtatttcccggcacttcctgagttcctgtcagtgtatattctacagaaagcaagctctactgttgttgttaactatctcaatgaaactaccatttatttgtgacccgcagaacctcacaataagtaattgtgcactgaaagaaaacttgctactgtcataaatttgttatccaataagtaatggtcatgatgattacagtttcatccgtatttgtttctccataattgtcattttcggtcgatcaacttggtcctattcctgcaagtcttgattgtacaatgtttcgcccaaagaaaacattaactttcttatatacaaatcctgcttacatatggcaactgtttttccgctcacaatttgatattgcacgtttttcgaattatttttttagcataaaggtttcctttggtatccataaagaatgcatacattaagtgcatcattggtacccaaacttatagggatttgttgcttgtgctttgaaatttgacaatcattatttagatctctaaaattctatatttctatgttcaggaatgaccaaatctgacttaatcagcaactagcatgacatggaatattgacctgatgttcctaagtaatataaaaggaaagctaaaaacttttcttcagatccaaagacatcaatatttatttaatctttggtcaactaataagccaatgccaacctttgtactttgttgaacttatttgttcactttacttctacaagacttctttctattctttatactcttttacttcaattggcccctcagtgacacttgcatatgcaaatctttgaatgatataagtattttttttgggtatccattgtgggtgtggtggtggcaggacattgactgaaaacagttgccgtatgtaagagatttgtacactaggaaaatttagtgttatggagcagttctctgttctgggtttcttgttgccatagtgcaatcaccaatccacacatatgtgcagccttagcactagagtatacatgcttgagcaactatgtgctgaatgttttagccactgcattacaacagggaataaacttctttaagcaaacataattactactgcaaaatcataaacaccgaggatgagcttatatgttctattagtccatttgctatcaattttaattacaaatgtttattatagccactagttctctttttgtatgttgagatgtagccacaaattcattgatgtatgttcattatgaatgagattgatttttaacgataaccatttacttctaactttgtcttgttataacaccagaacctgttatgagcccccagttattgttcatggccacttatcgatcactgtgagcaagtgatttccaaaattgtgttgactttgtatgttgctgatgtgtaagctactggttctagtttatacgtttacaatgtagcttggtatcagtatcaccaatctagaaccctaatatgcatgtgcaggtaatttcttggttgggtcactaatctcatcttggaattatgctgatgtgtaagctactggttctagtttatacgtttacaatgtagcttggtatcagtatcgccaatctagaaccctaatatgcatgtgcaggtaatttcttggttgggtcactaatctcatcttggaattatgcaggtggtgttcgttgcctggctatactta

SEQ ID NO: 14701 - DNA, 2433 bp, Setaria italica
  Intron number 1 from transcript Si022377m (locus Si022377m .g) derived from phytozome v7.0 (chr-ID scaffold_3; pos 76 23879 to 7626311 reverse strand)
acctggttcccgcccaaccccgaaggcatcgtaaggttccgcacactcccataagctagctaccttctccattccttgctgcttggatctgggtagattcatgatctatgtcgatgctgctcgtgccatgcttgtactagaagcttttagctgcgtgtgcgtgtcgagctgataccacgatgggatctgataaaacgttgcttccgggctattacttgtatttctcctctgcaggtttctagtagcctagatcactgcattcagttccaattgcgaatgctcactctctggaacctgaaaaacggatgattctaggattgtagctgctgcaaacgcaggacatgtacttttcgatagagcagttcagggcaagtcgctgagtcttactaattggggaaattcggtggcggccactcgtataatcttacttcttgcgggtcgcgaatgatcgctaacatgacatccactgcaagcggttatggcatcctatcaaatatagcagaaatgagcaaatcagcatgacaacttcagatagcaatacaaatttgtttccatcatgtggctcacactaataaattaatattcacatattagaactggaattagtttgcaatgaaatgttagccgtttctgaaggaagaggagtgcagattgttgcataccaagtgtcatggatgcatagcagagagtatacatcaagactcactcactgaagtagatttgatatctctattggtccactgagcaaatgatcatttctcattcaaagcagatcacatatgagaattttctttttcattagattggtagcttgtttgtagggaagatacactagctactttagttctttggacctttaagtggtgcagtgtgtataatggaatgaaatcgggcaagagaaaaggaggctcacattctttattatgccgattataagacgatttcttgacgcagcttgtttacattttacagtctagtgtcaacatagtaagcacgaatgtaattcactgttttgaggctttgcaatgtagacacaaaaaggcaaggtgattcgctatgaagctggtaatgtacacaagttgcatggttattttgcttgttgtggactaggagactgtttgtgtagggcggggatacggaaccaaatagattggcctcttcgaaattttataatgttctctgttttatgttttgtacccgtttggtttaaaatgaacatttttatcgttttgtccaagttgcattcagatgcatcctgtgtttcttgcacaataatgcatacataatgaagtgttatgatacagtatatgcttttccatgcacaagcagagaggcctcttggatgagacataaaattagaatctatgataagcttcattaactgttcattcatttctcatggataaactgtacttgaactactatgaaagaacattaccaaattattgtattctatgtatcacattaccagaaccagattaagacgctggtgtacaaatttttgctcataaaagaaaagttgtaattaggtctcagtatgccctcaattaaatgaacccctaaatctatttggacctcatcatatgtgacccattattgtaatatggttgaagtggggcagagttccttacagctattagtttcatttaaattttcatgtcgacggatcttgaagttgatattacaaagtgatctagaaattgaggattggaggtgcaaaacaattaaagatctgtaatgttttctacatcaactttgtaatgatatactccctcctccttttgtaaggtgcacaggcaacccaagattcaattttttttatctttgtctgaaacttagtatttgaatttctagattataaaattcgatatcattggattcatttgaaagcactttcatactatgtcaattttatggtcatgaatattgtaatgtatgagatatcaacggtcaaagtgtggccttcgagactgactgggtcaaacttcgccttacattttgaggagggagtatttgattatatagttacacatgcatgtagctcccactgtgactacaatcctcctctcaaataatttacctggacatccatgtcctgaattctctttatttagttttttaaatcagatgccaaatccgagtcggattccagacttgtgcccatgtggaggtttttctttttttccgttgccaaatcagactctcagatctgagtcagattccgacactcatcttatgtccatttaatgctgcgaagatctataacccaaccatgtcgacccgctactctctcttgttaaggccattcattggctaaacggtttaataggaaaaatattctttcaattttcaaccttttaagatgccagtaacatgttgaaccttgtttgggcttactttgccccttttctctgctatgttgcagtttggaac

SEQ ID NO: 14702 - DNA, 1110 bp, Setaria italica
  Intron number 5 from transcript Si040283m (locus Si040283m .g) derived from phytozome v7.0 (chr-ID scaffold_9; pos 20 303079 to 20304188 reverse strand)
ctgtgccctttgttgtggttgctggtagccacaaggttgatttctgcacattatacctaatatttacaacctttgtggccaaataagaatcagtgtctacattttactgtttttccaatgtatgcgtgtgtccataacttaatatagagactcaaatcaatgttaagacatggtgcactatcctgcagttagctcacaagagactcaaatcaatgttaagacatggtgcactatcctgcagttagctcacaactatgttcaataaataaagaaaagaagtggaatttgaagaacttaagaggatgctgtcaatgtcatattgtggtgatacaatcatagtagcatcttaaccaaatgtttccctgacatcaattcagatacaattcgttcaccctaccatgtatcattatctgaaaacattcccatcatctaaggaaatctcttgaatgtttccattttccacaggtgccatgcttagaagcttcatgagtgtagcataggttcacatcatatagtgcatacaccattattctttgtattttagtgtcaaatagatttgtactatgtgaagtattttcttgtgaatagcaagctagaaagatggttaatcctctctggacatgaaccccaccctggctgggattaatgctgaggcctctcatcaggagcactatttgcttgcaaagggggccacttaagtgctcaagtgaagtattttataaccttcaaaatttgtactttcttaaagaaatgctcactccaatatacattttcagcaattcatttgttgaattatttgttgccaaaagattatagcaaatatacaacaacatcagagtacttttgatgaaaaatgtactagtattttcctttatgttaggtaggtgtcaaagttttaaaatgttgactgtacacaattgagaaccatgagtaaaggagaatacacttgttgcgtaaatagcaatagttggtatccacaatttgaatgctcggtcactgaatatcagttagatgtatttgtagtagaatctgttaataaagtttccattgtaatagccttctttctcacatgcagctgtgtcctttgtatccacacaacccagaggtgtt

SEQ ID NO: 14703 - DNA, 1297 bp, Setaria italica
  Intron number 2 from transcript Si036391m (locus Si036391m .g) derived from phytozome v7.0 (chr-ID scaffold_9; pos 24 217309 to 24218605)
tggtggtactgctttgctgatcaattctgatccaagtatgacctccctaacatatgcattgcttcatggttcttttgttcagtacaatagtatgtattaagtttccattagtagtgaattctgatgctttttgtttactcattatttggtttctaaagtgtttgtgattgtaaacttgcattgcagcattgtggtgcacacaatagtagcaatagaatgatagattgatagtgaaatggcatatgtagactaaagtgctcatttatattatggaataactgttttcaacaaaaaagccaagtactcctacatgttgtgcagcacctgcaatgctagtcattttttttaagataatgacaggtgatgaattcacgttcatattgttaggcactttctgtcagaatggctattacttatcattggttatgtcattggcatactgaacactgagctagccagcgagagattatacatgacattgaccagaacagattattgattatgattttttgatgaattgagaaggagctaatgctgtacctgcttgaatctgatttatataacatatttaccttctgtcattgctattgaatcatttgacttatctaaaattctctacctgtaaaaacatggcatcgacatcttacttttttttcattaataagtaacttaaatatgtttgatttagcaacatgattgatcactgggataccttatcctattggttcaggaacatttaggattgctgggtatgtttggtagtagtccaaatagcacagagatcctgtcttctttgctagttttaccctgaatatagttttaatctcaccagtccactctgcacactgctcttctcttgttgttcactgtttgaagctaaaattaattaaagacttgtgaaaattggggcatatttggctcctgggtacatttgcagtgaatatagtgctctctaaatttatggcggtttatatgtatttttacaatatgagtgtttcgtttgaaaactatgtctaatctttaagggtttgattctgtgatatgtgaccaagatcttgtcagtaggtactacataacctttattagaactttataaatctgtggttgttgatccgttttttccacaagtcaaagcaaaaatgaattgataacagaactgtatgacatgctgcagatattacagtaaatttttcatgctctggtagtaatagtgctacacgataattcccttccagatgttagatttctgcctctgacatggtcccttgtatttacaggctatctacagtgccgcttc

SEQ ID NO: 14704 - DNA, 1119 bp, Setaria italica
  Intron number 12 from transcript Si033888m (locus Si033888 m.g) derived from phytozome v7.0 (chr-ID scaffold_9; pos 2 0457268 to 20458386 reverse strand)
ttgataaccaagatatattggatcttattgaaaaggtctaaacttctaagactaagagaatatacagttacatttgaaatatcctctgttatactatggtgatatgccaatattgtgttgttcgctcagattttctatcaattgccataccagtgtgcacaaataatgaatccgatatggtcttgacatacctgtggcatgtgtcagtgaagtttgttacattctctatttatgaattgtttctgcacataatatggtgtgctagttatatttgatttacctttaccagcttgactaaatgtatcaattttttttcctttcccccttatagtcgtggcattgggcctgtagctgtgcagctcatattgtttaatgtatcttaagtagatttctgaacggaattctgaataatctaatagcaatgcaaacagagctaatagttttagctctcccaatcgaatatggaaagggtacaagttgatttgatgcacacttttccagttgacaacagtcgctaactcgtacgtgccacttttacagaagtggcattgctgtagtatgtcaaaacattactcttaataatattttacattttgtacataaaataagtaatccatatagcttcgggtctagttatgagcgagcaatgtcggtacagtcttttgccttttgatgtacatgtaattgaacagttgaatttctgaaaaaagatggcattttcactgcatgtgttattagtgtaatgtagtaccagtgtgaagtgttgtattttgttcttgtaatctttcctccatttatgtttcaagcaagcagattatctgaataaatgaaacatattccaaaataatcgtccctttaatcactgtatttaacattcggaatccctttttggcttgtgtctgagtggatatttaactggatgcgcatattatcaagattttatcttaccagatttgtagaaaatgacattttgcatacttagtgggttgcatcaggaaatacatatctagtgctgaaattttcttctattgttatgttacttatctagttgtgtatttatataattatgctatttatgttttgttttgcagaaaccaataggcatagtttcactattgg

SEQ ID NO: 14705 - DNA, 2352 bp, Setaria italica
  Intron number 1 from transcript Si025934m (locus Si025934m .g) derived from phytozome v7.0 (chr-ID scaffold_8; pos 38 000666 to 38003017 reverse strand)
agtgtggggcttttgtttccgttggccggaatccggacttggtgaaagtttttaaggacattctctacgatcttgacaaagtttttaaggacattcactctacacaaaaaggtgcagatttgctcatccgccaactcctagacttcctacgagacaagaggtacatactcccgtagccacccaaactctacgctagctagctgttagtccgtcaacctatactttcgcactgctaataattgtgagaggaacaacatgtagaaattgacaaatgaattagagtccataactaatcattaaacatatttactattctctcatatagatacatcctccattttaaattttaggtcattttgacttttctaggttcatagatattattatgcatctagacatacactatctagatgcatagtaaaaactatgcccctaaaaaacccaaaacgatctacaatttggaacggagggagtacttatctttattcatttatgatagattttagttagtaactactttgcatattttttcatccatattcatagttagtaattgcacccttagtcccagcaatatatgtatcatgaaaattggtaatttcattgcttcttccatatatgagcacgtggtctacatgttgcatcatgcatgtatacacattaagttagtatttttatattaataataacaatatttttagaattatatattggtgtactttgggatatttattcataatggtatatgtaagaaattttgatttggatttagtgattatttttagtaatagaagatgtgggtaattaaaatacaaatttagagaattagataactaatttggatgaaaatagagagttaatttttgttatatttcatggtggcaaaggtggataatttagatatagatatagagggattactttggactattttcataatggtagatgtggtaatttttttagaaaatatagtagatctggctctaatgattagattctactgcattgatagttggatgttctaattttcataagaattttagaattggtcttattttaatagcacatctcatgagtaatagcaagatagtaccctactgttcaaagtttatttatccgctttcttatgaattgaactcgtatacgcacaaaattctcggtttccatgtcagtatgaaataaaagaacattagagatgcactttgaagtgtactattatagattagtctagatatgtgactttatacttttagtgtaagtttatatttttcctttttcttaattgagctaacatgatactccctccataatgaaatataagtgactttgagtttgttataagtcaaacaatcctatgtttcactaagtttataaaaaataacaataatatttatgatatcaaatgagtatcaatagattgtttatgaaatgtattttcatagtttacttctttgatacattagatattaaatttttatttataaagttggtcaaactcatgatagtttgatttaagataaactcaaaatccattatatttctatacagagggagtagtttcttaatcactaattatgagccctcaactatcttactcctacattataaggtgtctccatttttgacaactcagctagctataagtgccaacatagactcgttctatatgcatggcacaatgaacaaatgaacagagaaaactagctactagttaataggtactccctctgtccggcaatgagtgtccatttagaaaatttcagacacattagtagtaatgagaaaatgtctatgttgcctctaataactaatactaattgtgattgaaactcatgctgtccgtttagttttctagatcctaaataaatgcatgtgcattggaaccagagaaatgacatcatttgatcatttgattcgctctacgtgcttctccatatgtttttctttattggtgtgaatgttgttttaattagatgatatttactaggaggtaaaaggacactctttgtgggataaattttagagtctatagtgcatttccttacatatgcaatatgtatttaacatctctattatgtgtggacccacattagttttgaagaatgtgctataggtagttggtgaaatggtctatcaagttgacttcaccgttggagacactcacttgcagctgattgccaaccagtcagcaaagattcagaatcattagtttcattagtgttataacatgacgagtagttttctatttgttctatatattcattcacggttctttgttatatagatagatgtcttggatacttttactgactattgtcatgtgggtaggtacctaattgtcattgacgacgt

SEQ ID NO: 14706 - DNA, 2486 bp, Setaria italica
  Intron number 1 from transcript Si030960m (locus Si030960m .g) derived from phytozome v7.0 (chr-ID scaffold_2; pos 36 731546 to 36734031)
cgcggcaagctcttcgagttctgcagcgggcaaaggtatacgcacgagccagcagcacggcgcgcaggcatctgtgtacgagttggcagtaccgggggtccttggatctcgctggatctggcctccggtgaagcgcggggcgctggcggggacttcgaaggggctcccgagctaactaggggcgtggtttcgcggggatctgggtgagaccgggccgatctgtgagaggcgaagctcgtaggttctgaactggtcatgtgtgatgcgttttcgagggttctgggagtagaaacttggtggatttgtagcggatccggaattagggttttgggtgtctctctggcttgtgggtgtggtgatcttcgtagatctggtgggttttgcacccgggtttatagcacatcgattggtctagagatggcgcgaattcccggttaaattaactgcatatttgcttgggcgagagctagatacttgaatccgggttaaataaggtattttttgctcagattttggcatgttttgctgtgccatctgacaaaggtttaatcgcttggtgacagcttaattagtttgtgcatcacatcagccagttagcgtgttctggtgttcgtgcagggactcagatgagggttcgtagcatgcatgcatccgctagtttattcgcatagatcttttgggacttggtaggaaacagaaaagtttcttgaatctgagtggctgctgttctgatgtagagtctcttgcaaaagtattttttttgtttccacttcatactaaaaagtaaaaaggggtctcatatatatgtatgtttagtaagcttaccataaaaaatgaaggctattgataacttttctttttgtgacaaaagaaggaacatattctaaactagcgtgtatataaacttttcagttgcaattttcttactttgtggttttatggtcatgtcatactttatgcaactaaaacaggtaggtcagtttcttctttgtttgaatgatcgaacatacaataaaaaaccaattagcatggtttgagatcacaacaagtcagcacacaaataaatttcagcatgtaacaaattttagataacttttagctaactgtatctgtcattggctccagaacaagcatttctttttttctaactaatggacacaaaaaaatatggttagtttcgttggtgggcacatgtgcgttctgttccaaatccaaatttgtcctcctctggatccctaggatcaccttgtaattgatatggctctacagaataaaaatgattgttaaaatgaaagaaaaggaaagggtttaccccaagtccagctgctttgataacaattagatgcatattggtttgttacttcatggtactaaaaagtattttgctgaggtgctggtaaatttgtaaatactttccatgatccagcaaacagcaggcaattatgttttttagttacataaatctgtaataaaaaaccttaatttctttctgttgcaaatgtaaagaagataccagagtatgcagtttctacacctgttttgtttttgtaagctgcatgtcaggatctggggatctcttgtgccagacactggatagtgttactttccaacaaatatgcacatcatattttgccactaataatttttgtagaaagaaaaattgcaattttgaatgtaaatataattttgctttacatcaaaccatctacatgtctaacttcattaagaggaaaaatggtaattgattcattttcgaagttgtaattttagcattattgaagtgtatgacggaacagcaatctttgagacctcggtctgtgttgctcgaggacaaggaaaggtacacaagattcctaggattgacctggaagtataacaagagtacaatcagtgacagctttcaattgtcattggttgtgtctcctcacctctctcaccgaattgtcctttcatgtcattgttttgaaaacccatgctgacatgcccgtaaaactctccaaggaaaagctttatcagatgtcccttcagagactatagaattgctgcctagctagtactctagtattttatgctgacagatactcatcgtattctgtagattttgttcccgcgcatcagttttcccctcgaagtctgcaacatggcagaacaactgagattctcgtggtataagggataattgattattctagggtccattgggtgaagccataatatttttttctctcgtgtgctatatattactggcacattactgcgatgaacttgaactatcaatactaagataaatacaaattcttctagatgctttaatttggtttttctttgtgtgcaaccaaaattcttctataattgagagaatcttagtcgcatttgcatttttaccttctcaatcaaatcaccatattttatgtactctgctaactatccatgtcaatttggaacttgtagcagcatcacgaaaacacttgagaggtaccaaaaat

SEQ ID NO: 14707 - DNA, 1239 bp, Setaria italica
  Intron number 1 from transcript Si002976m (locus Si002976m .g) derived from phytozome v7.0 (chr-ID scaffold_5; pos 44 713938 to 44715176)
cgagtccctccactcctggttctgtcgctccaggggtacgtatagctccttcagcatcctcggattatttactcccctcgaggcgagttccggtagtttaggcgctcaatcctcaaatctcagtcagctgaaattctcatatctcggtaggagtatttggaattgggatcggctgtaggatgttgctatgttacatctagctgtagctgtagctgtagctgtggctcaactagctaggatttaggtttctgattgtgtgcaaaagtttcattcactacgggtaattacgttgtgctttgtatgaattgatcattataattggatgttctgggtattaactgtgagatatggagaaacttaaggttatctaattcatcattggggttgctgttttgaattatttcgattcaaatagttagaacatatagtcatatatcctttaaggaaaataacagcttctgcccaatagaaatcttggacgacattgggtcacattttcgctgaaaatatgggaaccaggcagctgccatgcgttaagcaattaatttttactgcaagagccacctcattatatattttaaagaatcagtttcatcagctcctatagtgatgtactcataaatagacaattgttaaataacctgccaaatttactggatcagatggctgatgccttctttaatctttagtcagcaaagaaatggctaggtgcatcatgtcacatatgagttacattgtgagagatttggtgaaaattagccaattttggtgaatcaatatgaatagtgtggcaggtcccttagaatcggggactaccagccagttgccattggtaaacctaatatatctatttgcttatatgtatgatttgagtaggtcggcacaaattaaagcttgtttcacctgctggaaaaatgtctactgtgcagcattttgtaatgtttacatttctgctttcagccctgagccatctttgtactgttattcttttactttagcgatttgttttaaattttaagtgcacaagtgcattggctttatgtgggattctttagtcaggaaagagtgaatttcgttccaattttttcacagcttcatttttttggaattcaagtgtttttttaaacatctatttaattgtctttggactgaatttcataagcttagacatttttggggtccatttgtattgataaggtttctatttcaggtccgcattattttgaagacttggtggat

SEQ ID NO: 14708 - DNA, 2035 bp, Setaria italica
  Intron number 1 from transcript Si017157m (locus Si017157m .g) derived from phytozome v7.0 (chr-ID scaffold_1; pos 22 859471 to 22861505 reverse strand)
agggatcccgtcgtcctcgcctccggccaggtacttgctcccaatgccttccttgggttcggggttgtgttgggttggattagattgcgcgaccgttacttgtcaaacaggagtgttcgttgtctccgattcgggggttttatttactagggttaaatcgttgttgctcgacccgtggtaactgtgacaggggaagcaaagcaagaatgtttagccttaatacgatttttcaaagaaaaaaatgaagtgcgatttaattgtgacttcccccaagggatcgagtggatggatttcgaattgcctttgagcgctaccggttgtttcttaattcaccttccccgcgtaactactgttgattgcccctcccttgtcctcatcctactctgtgctgctgcaacgtctgaacctccaaacacagctgaaattaaattcgtggtgtgccagaagcttctgatgaatccgccacctgtccctttcctggttcctacagttttgttcctatccctttatttctttctggacttcaatttttccccctgctactttttgctcatgattcgccgctcttccgtgatgtgattgaggttgctgagcagtgttttcaaaatttccatctactagtatcttttttggactgttgcatttgttacagtcagattttcttttttgtcatttgattattctgagaaggcgaggattagaactttctctttcagcgcacctgttgcttttgtcgttctattaactggtggacattcttcaggcatgggctaaaatagactacttttactgggcggcagattattctatttttatgtgctgtccttaatttctgaacctcttgtccagctcttgaaaattacggttgccgattgaataagtgctccattcctgttgtactttctccatggcaagtgcatagaaatgaacccacatggcgtttcatcctctgctacgcaaccccgtgcgcttctgcttcatttccagcgatgacattgcgtgctcgaaggcgagacccagttttcatggcctggatttggagtcaggaggatttattattccaataggaaaattaagtttcagatgggtgctaccattttgaccctctgacgtcccccatgctaagacactgcatgtgactcgagttattgccatgttcacatgccgttcctctgctcttctttgcatgggcatatcataaaaagattcagcttttatggtgagagattttgtttgcatcgttctgtcggtgtgatgggagtaccacgacaattgaacgaacccatcagctatttttggccagctattgatgctgtggtagtggtccttgtttgctgagactttcatgcccgcaaactttgtacctcggttgatttctttccgggttgttcttggttcatgtttcaatcgcttggtttcttcccggattgtttttggttcctgttttaattgctttaaacactcaagtaaaagtttatctttgtttcaatggtttgctgtatgtattatgctgaattcactaagaaactatgtgttgtgtttgcacgatgggtaagttatgtcgaatcaaagaaagttgcaattatacgatatttctggagtggactaagagtgtaacagggctgcttgctctttactcaactactgaagttacttttaaacattgggttttgatttttcaataatagggttttaacactgaagttgcatgtccctttcaagatatgctgtatcccatactagctctgctatattgacctagtcctgcctttgtcggtgtgtcttattcaggatttattgtttagttcaggagaaggaaaaaggtgcgcatatgaacttttcttgaaatcgggtctcatattaggcagtgtgcattaatgattgatgccatttctcaaaattctttctatttaactcctatttcttatggtcccgattttgacattgtgtattggtgcattcatatccttcttttagcatttcatattttcatgatacaatcttgagataacacttttgcaccttgtgcagacgt

SEQ ID NO: 14709 - DNA, 984 bp, Setaria italica
  Intron number 4 from transcript Si017791m (locus Si017793m .g) derived from phytozome v7.0 (chr-ID scaffold_1; pos 23 813220 to 23814203)
ataactagtaagtgtcaactaagatcatgctttgtcttctcagggatttaacagttacagacatatttctgtatgtacttcttgtagtagtgcacttgtactgctatctgtagctcattgcagttctacttgtttttatgtttgggtgttactctgtatctgatttatatgctttttaagctggttggtttcatagtttcttgagttgtgccactgacacacaactggagttagtcattgttgactgtttttatcattctccacctgcacgcctacatttaccatataatctttcaacagtgaatttgggtttgtgatttaacacctacatctaatagattattactgggattactccatgctgctagcactaggcttcaacctaagtgccagagggtccaagtgtgctgcatcttttctttttcctaattgtaggagaatgtatatagtaaatgatatgcatgcactagtaatagtaaactatattgtatagttagggattctgtcatgttcggatgaacagaggagcatgcatataatgtttaacttaaaatcttgggaattctctcatcccttggttctaaaaaggctgagcatgggtttcaacttaccttgtttgttggaatcctgtcactgcacttgtagtttcatgaatgatggaaatttaaaatgtttgttaagagtctacctacttgcattatcaagtatttggagcaataaagggggttatatcatctgatgaagaatcacttaaaaagaatcaagaacatgacatcaacttgcatttatatttcttttcattttaaaggatagggcagtaacactataataacagtgaagtacaaaacaatatttctgacatagtatttacatgcgtagcaacattatataatgatggaacggatggtacacagtacactctccctaatcattttgttttaccttgcagtgattctgggtgaggtagccaactttgcagcatat

SEQ ID NO: 14710 - DNA, 2202 bp, Setaria italica
  Intron number 1 from transcript Si010752m (locus Si010752m .g) derived from phytozome v7.0 (chr-ID scaffold_7; pos 18 53597 to 1855798)
ccgatctcggcatccccgacctgctcgtcatacaggtcaacttctgcttccgtcgtggcatcaggccaaatttgtttctttacgggaaaactagtctaggcattattgagcctactaaaagttggctcctttctgattaacatcagcgccagtactgcttgatagcgtaaacactcttttaggcaattggtggccttacttttactgaaagcaagtgataaagttgatcagtttaggtcatcagcctggtcatttcgaagaattttgctgaaattcagcttaatttccattgctagtcaaacagtgtggatgctacaaatgctctgctcaatttccattcgtttccatgcaaattgattgcttgaggaactagtaattggctaaacaaaatttggctgttttatgggcaaaattgtcccttcaatccaggtgtacttgctgttccgggctcatcttgactaactataaaattagtagcccgacgattggccttgtatgggggaaagaatgctgaacatgccactatgccagtcacccttcctcatgtacgctactttcactctactcttttgcattcacttgaaaatcaaaccagattgaaagggtcatgtctttgacatactccagctggaaacctatgaccctttgagtccttagaactcaatccacatgaaattattgcaaaatgttaagagatacatgacccgaggaactactgatagagagctcccatacatttgaccatcactctttgtggaaatgaaacatagaaacacactgaaactctgcatcgagtacaacttctgtagtagatcaagttaagttaatgcatttttttgtgggtgaggaagtcatcattatctcataactgcaggttaatgtaaatcaattggttgattcttagatatgcaacatgtagtacatatgaaaacctccatgcaagaatggcatgactgaaaacatgttgtactaaagttccaacataagtaacaaaaagttgcttgtgactcactgaaagtactctagttgtcaatgtgctaactagggccacccttctgtgaaccattggagtaaagaatggaacattcatttagctaccaagccttttaaggaaatagtacatcctaccaaatggctgatgccatatgaaatggcagcatgctaaagacaaccaaactaaacgcaataactttgttttaagaaattttgtggctcttgccaagcatctttttaaataatggtcttcctccaagcaacagttagtatattacaggacacaatacacactacctaataactaggtatgacttttacgggggtgcttggatcccttgctggaccttgctttgcctagctaggcaagaaaacttgcatttggtttctgagcaagctcttcctgaagtctgtgatggcaagctttttgcttgcttctgagggagagggatttttgctaggccttgctcgagctggcgaggtgaggctaggctggccaaggtaccaagcgcgcccaacatcactatcatatttcttacctttgactcaaagtggttatgtttttggtctttgtgagaatagcacaggactgatgactaatttgagattttcattttctgataaaagtatagtagatcctttttatcaggtttaatgatccattttttccttgaacaagcttaatccgaatggtccaaggagggcactttaccaccaggagctaggagattgttgctagtcactctgcagtttaccctttaaggcactacctttaccagcggtcaattcacatgttttttgtgattctgggctttagttgagatatgaactggagtccagtacagtactctgtctaatgaagcttcagtgaatatgatgtagggaaaataacattggttattcttgtttctatgcctcaagactaactttgtttacacatgtacattctggttaccccattgatctggatatgtttatgtgttagtaaagttctaaaaatctgtgaataacatgttctgggatcttaagctctgaacatttaacgaatctacacccacttacctctgttttcagctttattatccttggtgaaaagatcatttattttatttttcctacgtcagtgtatccagagtgagaaataagaaactgttttgtcacttgttcccttcaggttggtcttgcatcaggagaggggaattacactga

SEQ ID NO: 14711 - DNA, 1414 bp, Setaria italica
  Intron number 2 from transcript Si031344m (locus Si031295m .g) derived from phytozome v7.0 (chr-ID scaffold_2; pos 71 87191 to 7188604 reverse strand)
ctatcgaagaagctggagttcgaggagatttagtggtgagatatagtcttatcataaactttcgtgctaaacatgaaatattaattgtatcctggaaaaattcccgtcctcttctaaggcataaatggcaaactgtgttttttatgatatatggcatattctgttttatggcaatacatgcacgagacactttttggagttaccagatttgtagatgtccatgtactctatgtcttacccttatctggaatctagaactttggacttagtctggaaatttgagattattctggtgtcttaactttcagcctggtgctatgaattcgttggaactttcttcatagtacaaaattttattgacactagagcactaacatgctaattgttaagcgtcaatctctatcaagccttaggagttctctatgaattttttatggacagctggaactatttgtccactttggtagactcctctcccatttgatgatgctagcatccacttgttttttagttggtaatttgacacttcataaaactaggaccatttgatgttaagaactgtgccatttgtctaaaaggatagtttgtccccatcatccatagtttagcttattagtgtatatactcttgtctgatcctttgttgtctatgacactaaaataataaagttatagtgataaatatgtacctttgaatgattatattatcattttgatgtgtgaaatccgaatactttgatgtatagcagtgataaaggatttaaagttttgctgcatgcattgtagaatgatatctaatttggctagaggtagtattgttattgcacttctgtaaccataaattatgggagttaactgatgggttaaggtaggattcttttgtagttaacataatccagacctaagccatgcttgctaccatctcctgtggtcttctactatatcagcatttatttttctcataattgcatctggttacgttacttccatatgtttggtgctattgatagtttggtactataaaagaatgcaagtatttatacaagaacacactgcatctaataaaacatgaataatatcaaataaaagtatgtagtggatgcatttatttggcatttaccaacttttgtgcagaaatgcaagcaggttaaagatttaaattttgcaattgtaaggccacccttgttcatttacatgtctgcatcctagcaaatcgaggcaaactttgtgtctgcatatatataaatggactttgttcagttgttctgtttgactttttacactgtgccatatttttatgttctttctaaacagctcttatttgcttccgaatgtcctgccagcacattttctgatcgtgctacttgttctgtgcataagaaactgttgggcttctacgatttcaagagcaagca

SEQ ID NO: 14712 - DNA, 2569 bp, Setaria italica
  Intron number 1 from transcript Si025754m (locus Si025651m .g) derived from phytozome v7.0 (chr-ID scaffold_3; pos 83 49780 to 8352348 reverse strand)
ggagcagcgacacgaggcgacgatttgttccaggtgcaagtgcaaatccccctacccttccgtccgcttgtaccttctatgattcaaataggtgtgcatctcttctgagccgattattatgtatcgatttcacagcggatcccgctttatatcatggaacaaactacgaatcgtgttcatttttttttctgtcgactactctagggtttcttcccattagcgcagttatatcttactggctttttgtcacaccagaacacccctctgatgtttaggttgataatctgggcagcttattacatacattagccacatcgtttgtcaggcatctgttgcatttggattatttgttaacttgtattgagttgaccagcattcttatcagtttttaacattgttggtgcatgatttatgtgtcaaatgcgctaagcaaaaacaggcattaataacttgaagttacaatcatttttgttgtttgtgctaggtactagcccctttttgaacgaaaacattatcatgatgattatttgtattagttagttctaattaggtagcttgacaactagctaggtgccttttttaactcagaattcacggtgcttataattttacccctttaaccattgatgaaactatactaactttttttatatgtgcatcaccttttctatttcatattagcaggtcaatttttttatgttttatctgagaaatgaagttgtttggtgccttttattattagaaaagtacggtgacatatctgatccacaccataaaacagagtaacttatgcgtttaaatagagaagtacacttgtgtatgatattacacataagaagtaactaatttgctgatttacatgagatatgaagtaaaccgcccctgaatttgaacacctagaaagtaactagtcctatatttgtattagataggaagtaacttgctctagcttcagtcacataagaagtaactagttatttatttagaggagataagatgttacctccccctttattctgctatgttgatactgttagcttttgtgagcaatttcaacccctgcttcatctatttagcaaatttcattgtgcgacattgtttttacatgaaaaaaaatagtttgcctccttaatagtgttgtgtcagtgatgtacaaagtaactccgtgcctaattttaaacacatagcaagtaacaccattatcttagtgatacacccattatcccatcattattttatatgagattgaaagtaattaatcacggatccacatgatgaaataaagtaacttgtgagtttaaatagggaatgaacttgtatatgattttacttttttccaaccttctgcaggtgtagctaaggcagcgtccctacacattggggtggaagcgtttctcttgatatctagtgtaggcacatattgatcagttatgttccaaacatatacctcccagctatgtgcatggcaatttgtaaaatattttatcggtttgaatcacatgtgtatgactaactcctatctgaactagatgaaagcaagcttttgtagagatcgttaggaattacacgaagcccaacatctttgtgtgttaattgcatagtgcaatcatattaggctggtagctggtccgtcttgcttttattattttatattctggtttgcattatcaggatagacccaaagttgtcttgcttttcaaatttccatttgggacaatgtgatgccctccatgactaatcttattcataaacacctgctgttctcatgactgtgggcctgtggcttgttctctctgatggccagcctatttgcaattttcctttcatccttatttgtcctgctttgatgttacctccgatttgcattcctttttatgagggatggtaaacaaaagctattttgtcgtacttattgtcacttgaatctttttttatcccttgctacatgagcaaaatccgtatgaattgtgggcatcctctcgttctgtctggtaggcagattacatcttttttagtgttttgtccttggcctgtcgtgttgtttgctggagcttttttatgtgcctactactagttgaacatagagtggtttttagtttctgtggggtggtaatccgctgaacgaagtcacttttaaatgtttcctgccttgatatgcggtgtctcttgaagcatatgatatgctgtatgtctattgaagcaatgaacgaagtcagcggtgcctcttgaagcacaacatgatatgtgttatgtctcttatctagggaagttacttatcgttcatttgcatgatgtacatagtaacttatccctgttttgatatgtgtaggaagtaacttatacaaaattcatatgataaaaagctaactttgtcattaacatacctgattttgaactcagtagagagtaacttaatcatacgactatattagacatattgtaacttgttcccggtttgaaaaatataggtagtatctaatcaatcaattatatgagattggaagtaactttgcccatgttttgaaacatgacagggtggtcaactttgtgactattttcacattacaaa

SEQ ID NO: 14713 - DNA, 1268 bp, Setaria italica
  Intron number 3 from transcript Si029692m (locus Si029692m .g) derived from phytozome v7.0 (chr-ID scaffold_2; pos 10 716993 to 10718260 reverse strand)
acatcgacgtgcattgtctggctagtttgatcaaggtaagcggctatgtcaagttggtgtgtctgagcaattaaacagttgaaaactgatgcgctggcatccaacatccaatatttgtttgaattgtcaaataaatcaaacaaacgatggttattaggagagatttgctcttgcaattggcaagcacttttgccttaatattctcaaacttatctcaaagaggaacactgaaactaaagctgtttgataatgtcctgtcaagttggaatgtgaacctgattttgtgttagtgttgagacatggaacaacattctgcatcttagtggcctactggccttagagtaagcagtattaatctcacagaatgatcatttcattttccagttcaagaaggcagcttacctttttatagaaacgagggctattgggtcattgacgtgatataagccatacctgttcagtcttgttggtattttattggaaggagccaaaccaaatttgttagatgtttctcaattcaagcacctaagattggtagtgaactaacatttgtttactgtaatgctattcaacacacaaatgtgtggcattttagaatccgtgctcaaaggttccaaatgctggggtaaggtgttgacagttcttgtgcttttttccttgaaaaaacttttagcctaaactttcagagctttaaccaacatgttttgacagaagatatcttgcattgtagactgcacgctcattcgaaagtcgaaactgcatacattttaggcacatggactagtacagaatgaatgccatttatctaatattatcgacatatgtgtgaactgagagtctttaactctcaatttaaccttttctgattctgaagatgaagttgggctctccagatatgatgtgtgcttgttatcagaaaagaaaaatctgatgatgcccttgttagtttaattcaaccccgtatatatccagatttctggtctacaagtcatcttatttgcatactttttccccttttccattgcacatgcccttttttcttgaaaaaacgctaatcaacaatacatgccttctgtatgggaataattttagtacactttataatgttgttagaatatatatgtttctttgaggaaatttgccactagagtaatgctgaaaccgtgaatggagcaatggcattgatctcctgtggtctgatcttttacattatgtactgggcatgtgaaacaggcctggttcagagaacttcctgagggggtgcttga

SEQ ID NO: 14714 - DNA, 2909 bp, Setaria italica
  Intron number 1 from transcript Si035448m (locus Si035448m .g) derived from phytozome v7.0 (chr-ID scaffold_9; pos 51 33612 to 5136520 reverse strand)
gttgctccccatcacgccaagcaaccgaaggtaatgctgcagagatcacacttcttcctcccctctgctccgatccgtacgcctcgtcgtcgtcgccatggcctgattgcgtttcgtggtctcgcgtgagaggcactcaaaggcgaatcaccagctttccttgggctggttggttgcctccgcggcggttgcaaccgattcgggtggggcgacgccgtgatggtagttccttttcctctgcttcactccattgtcggcggattcgtgcgtggactgtagttggcggaggagccagagccgagatgcagatccggtattcgttgaaatgtctcagtgggagtctcttcgcgtttccttttttgttggtgtggtcgatggcgatgttgcatgttggtagggatggtgggggtttaaaaactgtgatttgtttagttagttgtcttgtgtcttctttatgaagtcctaagtctgtgtgttgggcactgttttataaaatgggaaaaaatttagaaaaaaaacttagttatacatttttcttttgaatagatttcaattagtttgactagacagagttttggttcctatgtagtgtatttagtattcaactatacatgggccgacttgtacttggaagaatttatcatttgagtgagaaaacaagggtatttgttgacttggtagtttgagcatgtgccaatccatgacttagaactgtggaaattaaagaactttctctagaaccttttcctaaatgatggcttaaggagaaaagaaagattgagtctttttcagtctactactagcattaatcaaacgacagtgactacagactaagaaagttcttccttttcctgattacactccatctctgcatataaacaaaaagcctctctaggaaaattttccctttagtttttccttctaacttttataccatcagccctggagtttccctgcactggatccagcctatgtttcttaatcagcaaacaaaacacacgttttggttggtgacttggtggagagtatagttgggagaagcatcagcatcagcatcagcttcctggatttggccgtgtcccggctttgaaaatttctactgcctcggctcggttgatccggcccgcatttcctacgtctcggtctccatcgctttagcttctgcaaccttggttagtactcgtagcatattgtatggttcagagctcaattattcggttgctgtttgtagttgaccgcgggattaaattacagcaactcttaggttattctgcaggccatgttccttgacttgcttccagttcatgggctacatgtacgcacccatctcgcctgaccttagtctctgtacactgaacgtgagatagagccagatctgatcagagagtaatcagactgctcagttacaccaaaaactgttcaatcagcaactgcaaaaaaaaaaagctttatcagcaccttttgtttatgcgcttgatggcacaggagaatttctttctttccttttgttttgaagagagagggggctgagggtatagaaggaaagtggtttggtagagtgtcatggactcatgcgagcgcctttttgattaatgcaagtttggtggcatgcatgagcatgagcactcgtcgtccacctcacgatccccccttccccctactccggtttccgaccatcctttgacgcggttactttttttttccttcgacccggcacggttattttttgaagggggaggggtagatctgattcggtgggtttgcgtggcggggtatttaaggagttgtggcctcgcctctcctctgcacacacacaactcggaggcagcgagcgtctccctcccctaccacacgcatcgcgcacaggaagagagcgaggtcgccgcctctctccgtcggtggtgcgggtgcccgccctcgtcgagcgagatctccctgcggctcctcgagatctggtgagactcgtgccccgatcccgcgcgattgctttgatttttccattcctgatcgtgccaggcgaggatcgtgatcccgttctgcgtagtagttggttcctcgagttagttctgtataagcagttgttccccgagttcgttctctgaggaagatgatgtcctcagatctgggagtttcgtggtttggatctgatccggatcacgattatgtggtgtagtaactgaataggatttgcgccccctggaattcgcatcctctgctctcgttttgggtcagagtttcagatctttctggctgatcgcggttaaatatggtcttgttgttcatatcattttcgtgagtaaattcatattggattagaggtcatggatctggttcctgtccatcattctgtttgggctctgtcccttttttttcagtataaaccgtactttacataatgagaatgggatcacaattggtttggtgcctttggtggcttaataattagtgagtactccccaatttgtatggttccacaagaatttaggaagcattaattacagatgtacggttgagaagagtgctaacgggtcagtttcgatcagcagaggcagatatgggctatacttgcttaacaaaaatgagatctgaatacgtcctaaaccttccaaacaaaatatgccttttcagatgcagtctgacctggtaggctaacttttccagatgttgccaaattggtaacttctgtttgttcggttcagttgagttactttgttagaacctggttctgtatgcctctgttatttcagttttgctttaatgttcaggatcttgtgcttttgcttgtgaatcctgagggcttcagttgacttgaaatacttgtatgtcatgtctgatctgtgtattctgttttatacaatccacttaagaagcaccttttgcaattacaggtcacagatctagctgacaag

SEQ ID NO: 14715 - DNA, 478 bp, Setaria italica
  Intron number 12 from transcript Si016198m (locus Si016198 m.g) derived from phytozome v7.0 (chr-ID scaffold_1; pos 3 5593579 to 35594056)
ctcgaatttgtgttattgaggcattgaaggcaaaggtattattggatttgtttaattatactttcaaaaatgtctacatcaccagaatctctaaaagatagttactgcatattgatggcatggtatggatttgtatgcattataatgtaaagcatggcatgcataactttaacagagctatattaaaactaatgtgcatcatgttatggctttgggatttagtaatgagtattcatagttaggatattataagtagatctcatgttttcgtgggatccttgatatctatggatactagtgatagactttacccttaataaatcatgatgattccttgtttttcctgtgtgtggtgggtaggggtaatagtgttattgccttctttttttgtctcatattgttttaagtagttctggacttctgacaatgtttgattatgctaattaagggcttgtacaagggtacaaagaagacagaa

SEQ ID NO: 14716 - DNA, 1652 bp, Setaria italica
  Intron number 5 from transcript Si000473m (locus Si000473m .g) derived from phytozome v7.0 (chr-ID scaffold_5; pos 41 883716 to 41885367 reverse strand)
ttcttatcaggcttgaggtttgcctttcacttactatttgcttttttgagcagcatgtcatattgcatttactaaggtgctcaaactatctggcaaattcttattcaagctcttgcagctaggtgatcttcttaatgctatacatatgattctgcttattctagattgttattgagcgtcatttttgtaaagtaatgtttaagataaatgacattgatagtgtatgctttgttaggagtggatggtagtaggctaagtaagcttagtcgaatctatttatgcaaatattggtaatgcaaagacctgaagtagtctaccaagttctggatttgtttgtgtattctgtattgttgtaagatagacatgaccagaagagctgtaagtgacctcctggtagaggtttgctactggataaagttttgctggtgtgccagtcttggaatagtaatgcagaattgctatcagaaattggcacagtaaattccttttagtagtcatcattccttatttcaaattgattttttccttgatatagcagatttattagcttatatattcatagttttggtcatcaattttgattaaaaagggttatggagtctggaagtggatgaagatgtgttatttgttatttccattcacccgaagttgactattttatgctagtgcagtagaaagcggcaacttactaccgcaatcctttcatataattgcaactaagtattccctgtgtttagacagatttatgagaaactgaaaacgtgtgctagtaatgtgctgcatttgcaaagtaagctgatatggtgacagctactaaatttagggggtgtttggatatcaggagctaaagtttagccctgtcacatcagatgttcggatgctaattaggaggactaaacatgaactaattataaaactaattgtagaacccctaggctaattcgcgagaagaatctattaagcctaattaatccatcattagcaaatggttaccgcagcaccacattgtcaaatcatggactaatcaggcttaatagatccgtctcacgaattagactccatctgtgtaattagttttgtaattagactatgtttaatacttctaattagtatctaaacatccgatgtgacagggctaaactttagccccctggagccaaacacccccttaatactacctccggtccaaattatttgtttttagctctttggaattgtttttcagataggactattcgttgttctacattgacaacggaactttttcttagattgccttattgaggtgttgtttgggctttggatgcgagaattatatgcaaatttgagaagatttatacttaccgcttactgcttctgaaactggaaatagctgtaaatgttcttggtctaaacgacccttacaaccccattagatgaaagatatgtgttcaattagtgattagcctgacactgaaggtctgaaaaagtcatcaagtaacacttattactaatagttattatagaaagaaagagtagaaaatcaattttgttaaaaaaagagtaggaaaatcgatggtttctctaagatgtttattgtgataatattgtaaactgagtatttgcctctttttgcaggctgaggtggctaaagttgttgaaacacaaacagg

SEQ ID NO: 14717 - DNA, 1208 bp, Setaria italica
  Intron number 2 from transcript Si031315m (locus Si031315m .g) derived from phytozome v7.0 (chr-ID scaffold_2; pos 10 700031 to 10701238 reverse strand)
cggccttctgctcgcaagaagagggtctagatcaggtttctactacctgcatttcaacaatttattagcaaggttcatatactgttcctgtatatgtttggaaaagttagatgatattagtttgaaattgatcccaggaaatgttgtttgtttatacccatcaggatcatgtctctccagctcttattttgcctttctatttacccctttgactgtgtcctgtaaaataagatgtcatttttatctgtttggctggctaattcaaatttcagtatttattagtggagtaattattgtagaatcacaccttttttagtcatatactcatattagctgaaaactgtgggattgatggcttctggcatataacactttgttcaatttttggtttgtttctgatcacctatcataaccaattctagccaaagctgacaggtaggtccccggtcccctcctataacgtcactccgtgctgttggtctatccaccttttgcatgctaacaataagaacactgctcatcagcagcatgccaattgacatgtgatcccaaagtgtattggtttgcttggggttttatggaaagccatatgacattatgattatagtctgtcaatcttgaaaaccccacattatatgccacaagctacaaaatctggtattttcttcagcagcaactataaactgtaggattctctgaaacgtaatcttattactcgtactacgtcgaagcactctaattggcaaaggtttgctttacagcacacttacatatgtgcctcttctgtaaatttacagctacagcacaaacactttgcctgaatctgaaagcgaggaaaaacagaggattgtaatacttactatgtcttgttgagttgatagcatataaaccagatccacaagggttagtcagcatgaaatgttgggttataccacaagtactctaaaactgctgatactagacatgctcgaagcatgtagcttctatattcagtttaaacctcagctgcagtgttgtagccaaagggacacataaaccttctgtctatgctataacaaaatcactgcaatattcagtatcaactacacggaggaatgactacttttgatgctatcgtgttcttgtattatttttcttgatttactttttaaaattctgctctaatcattgcagtctgtggcacttggagaaattttttgggttcaggc

SEQ ID NO: 14718 - DNA, 2244 bp, Setaria italica
  Intron number 3 from transcript Si012753m (locus Si012753m .g) derived from phytozome v7.0 (chr-ID scaffold_7; pos 24 704637 to 24706880 reverse strand)
atcactatcatcgttacgtatgtatgttgttataaagcttccatggatttcatgttgggtggtaatttagtaactatgtaaaatgggaatccatattagtagttggagagtttccagcaatgaatattatatctgtacaactacttgagaccagaagtatttttctatgctccaggaggacattgaattgatgcattccttgggtgtcaactcatatcgattttccattgcatgggcaaggattttaccaagtgagtttgacaaaatttaacttttatgtagtcacttgctttatttaagagatatattgttgtttcatagagctgttaaataaaggtggtggttgttggaattcaactcttcctacaggaggccgcttcgggcatgttaatccaaatggtgtagcattctacaatgcccttatcaatgctcttctacaaagaggtatattagttcaatatacaatgaacacaattttaaagacacctagttattaactgcattctaaacaggcatacaaccatttgtaacgatatgtcattacgacattccatatgaactggacaagcgatatggtggatggttgagcccggaaattcggtatgtccactgcttcatatattttctctgtaaacggcttcttactcttgattggttggtttgtttgacttcaagatactttccaggaaggactacagttaccttgcagacgtatgcttcaggatgttcggtgaccgagtcaagtattggataacgtttaatgagccaaatatgttcacaaaatccagttatatgtatggacggtaccctcctggtcactgctctaggccatatgggaactgtgctttcggagattcttcaactgagccctacatagtaggtcacaacatagtattgtctcatgcaaatgtggtcagcatttacaagaaaaactatcatgtacgaaatacactcaactctaggatatataagcacatggtgattcctcggtttgaaggttaagttactaaaaagaaaataaaaattgaaatatctttaacaaaatctctgtggcaagagaagtataataatatttttactgtttggtaggggaaacaaggtggtcgtattggaatgactgttctttcaagatggtacgaaccattccgaaataccacaacagacatcttagcagttgagcgggctctatcttttggtgctccatggtactttctttctgtatcattgataactaagaatacaaataatagtttgatttattttctaataacaagtcctaaaatctagtattataagttaatttctgatatgaaattgtattttttactctaaaacatctaggttgtaagttaattttttatacgtatttgtattctgtactccacctgatttgcttgattatgccaggtttctggacccaataattctacatgttggtgaaagggtaaacatacatattgtcgcaatattaatttattggaaataataataggcaaacggattggtggtgggaggttgtttaggctctcggtgctcatctaggtttgagtcctaggactaggttaggtaatgcccatctcttatttagtgaatgctaaagcagtacaactagcatgatcaattttgagaaagaatagactagctatcgattgttggccaacttgaagggaagagtagcaatgatttgatggtttcaatctcatttatgcggacagggtcgccaggcttcaattctgttccatatgggatggaaaaaacggtcatgtatttcaaaagaaaatataataacacaccgatgtatatcaccgaaaatggtatggtttcaaccaatttcttatttttgcagctggaataaacattagttctaaattgaagttatattttatatgtttttgttggtgttatttgagtagctattggaaagcaagccgttgttggctgtccatatcgtcaaactctcccaaagtcttctaatgcatgaagatgcttgattttattaggttatcctcaagcgagcaatagcagcatgaccgccaaggattttaccaacgacacaggaagagttgattaccttgatggttacatcacctttctagcctcagaaataaaggtaatttgagcaactttaaattgttggttcaatgcttaagcttcgagctatgcattcgatgtgtagcttcatgcatgatgcgcttcctctcttttcctttttgaaggaaaggagctgacgtgcgtggatacttc

SEQ ID NO: 14719 - DNA, 1435 bp, Setaria italica
  Intron number 6 from transcript Si019949m (locus Si019949m .g) derived from phytozome v7.0 (chr-ID scaffold_1; pos 31 745175 to 31746609)
caatcagagaggtacacattatttattgatcattagccttttcttaacataacaaaatagcatgcatactattttacatgaattggggccttaatctgcttcaattgtacattccttcagagattgcataacctcgcagttgcaccatccacccataaacatataattatgatttatcaattgatctttttataaccaagtcttaatcacgggattctattgaggaatacgatcaagtgtatttttcactaagatttattgatatgatcagtaatgatggatgctcaaaagttagaggaagcttacgtgcgtttgcttgggaacatacaattggtttggtggcaaccctgcatctcggtgaaataatcaaatctggctattgctaccacatattggtagagttagaggagcgaaacaccttttgcagagtaacacaggcatacacaacacatgattagcttaaagtatctccagaaggttactatgaaatgttttacagataaactaaaattacaaattagtctctgaggatctgttatcctctaatgtgagctatgcatattaaggatgctgtgttgtttatgtttggttttgctaatgattatagggctatcatttaataaagtaatttagtgatactcgaggatttcaagctgttttttgcttatgaactatgggaaatccagaactcgtaccgtttaaatctttgttctataatttggcatttgtagcaaggataagataaaacatctgaatttgttcaatggcatataaatactttctgtaaatcacatgtcttgtgcttggctggattattgcacgaacaaaacttagccaacctgaatttggagtcaaccttcagcacctccaattgcttgaatttgttgccgaactgctctagccactctatatgcctctccataccactatttttctttatcaaatcaaaagaatagaacagaaatttgcaccttttccttttagcagtgtggctcttaaaaaaacctattgaatcatcttggagggggcggggggggggggggggggggggcaatttatagtcgcaccttcatggcactagcgaagtgcaccacaggaaacccacttggagccaaagggtgttgttgggattctggtcattcttttggtatacgttttttttatggattagaaacttcctttagagctattacaggatgttttggttgaaatattcttgatcatgaattagactcctctgcagagcaaaataatattgtgaatcatatcttcttttcactgattgttcacgcatgcatcatatgataatatcatgtttctcatcctactcaggaagtgcctggtttcagtaacagatcaattttgtccactcctattgatgtgctctccctttgtgttaggtgcacccaggagaaccacgagagagcctaatcag

SEQ ID NO: 14720 - DNA, 2388 bp, Setaria italica
  Intron number 2 from transcript Si016425m (locus Si016425m .g) derived from phytozome v7.0 (chr-ID scaffold_1; pos 26 388015 to 26390402)
agctgcggttcggcttgccaaccgttatatcaccggtgagttcatgtcacttgcttagcctgttactccatttgatcttcgttatttgtgctgtaggcgtaactagtcagtcaattggcgttacaagtacaattggatgcgatttattgtttttttaacttgtgtaactagtgaggcaattggcgttgcaagttctagtactccctccatcccacaatatagctccgtttagacattttcaaaatcaaactttttctgaatagagaaataattatagagactaataacataaaaataatgttagtagatttatcatgaaaccaactattataatatataacctttcctatttgaaataaattattttttaaagatattgttggtcaaagtttaaaaaaaaatgacttttgaaaaagctaaacgtagctatattttgagacggagggaatagctagtaaaattggaaggtcatccttagcttccattttaaagataacggcacacatgagtaagctgactgctgattataccaatagaatgaacatgcgcatcattacagaaactgggtttaatcctgattctattctctataagaaaattggtttgaacttcacttctttttaatctctttaaaagctgatcttacactagactagtccatcaacgtgtgctccacatgtagatttataattttgggaggcataacaagctctagaaatttatgaaaaaaaagtgcccgcaagtaataataatcaaaactgtttaccttgcactcactcttatttattaaatattctaacacaatactcatgtagaaacatacttatccttatgtggtatttcaattatgagatcatttataattagtcaataaattgaacccttagtttgagcggtatgtttaacatgaaaatcagtattctcatatagcttcctccacacatgtatatgtatggtctaaatagtggaatacaaaagacaaatataccataagttagtaattagagtcacataaaggtgcacttttgggtattttttaaaatgacatacatagataatttaattaaactcacatttaaggattaatttaggttgtttttgacaatggtttgtgtgcaatgaagatacaaattcatagggttattttaacttatttatttataatgacatgggtgtgcaatttagatgaagattagggagttactttagtttgttttcttataattgcagatatgggtaatttaaatacacatttagtgggttactttatggttttttttcataatggtagatatgggtaatttaaatacatatttaggaggttactttagactatttttataatagcaaatgtggatatttttttagaaaatataatatagatggaatggataatgatgattagaggctaccggattaattgtcagatgcctctaatcatcatagccattccatctataatatattttctaaaaacattatccacaaataaaaaaagttaactaacaatagaccatattttcaaacttgccgatcctactttcttgcttaagaataagtttggttattctgttctgtatttttttaaaaaattcccatttcttccttgtaatcacttgaaagttgatccccaacttgtgcttaagctgtactattgttgcatgacccaggacgcgatagctgtagaaaatatgatactagacctcgttttcatttttttttgtgtttcctctgggggcaatgttttacctctgttactgattgcatgggccaaaatgtttcttaacaattccacttcatattggatgttgcatggttgtgtatttgatacgtcttacatgtatgtttaatttgctagtaggaaatgcatgtttgttcatatgacgagacacctttatattttttagaagacaatttctgcatttttgttgttgaacttaattaaaatcatattgatgaaatttacctccatttatagagtaaataaggttattgtttatcttgtatccaatgtgattatatatgaaacatgttatattagcaataggatcaggtaataatgtgccaacttggctttacacgttttcttttttgccatcaaccatcatcataactgaggcagaatagtgtagtatgttatggaggttgtgaaactgagagagatggttcaacacaatgtggaaataaactaaaaacttaatatggtgtggcctcgcttcaatttagtatgaaaagttaggcatattgtatttggtgtacggctggaggtcgatgtaattggtttcaaagtgtaagagtagcacactaacactagcccttgtttattacaaaacttgatgggttcatttgatcttcttgaaggtcgtcaatttcctgataaggcaattg

SEQ ID NO: 14721 - DNA, 3464 bp, Setaria italica
  Intron number 3 from transcript Si014083m (locus Si014078m .g) derived from phytozome v7.0 (chr-ID scaffold_6; pos 15 352736 to 15356199 reverse strand)
tggacagaacattgtctttggaactgtactggaaggtgagtttcttctctctttttttcagaacattgtttttgcagcaaatttattttgaattgtcggtctttcaagaacttaaatattatacccttgaatgttttcaaaaccccttactatgctgaatattttcagcctgtagatgtgtccttatgccatgcaaatttcaacacatgctggaaatcgtaagaaacctaatattattactattatctgtatactgatgttttcctcatgcatatggctttgttctcaccttttcctattatcagtctcatcataattctaattactcgttcccactttgtatgtcactaatcgtttcatttaatcgaggaaagtctgtttgccgtatgaccagcttctattcttctgaagatacaatctttgaactcggattttcaactgtgttatttacatgccatcctcatatgcccgtagttcttcacatgcttgtcacatatgcccgccactagagccagtcattgagataatctaaatctaagccttgcaggtactaaagatgatataccaagtctgaagatagcgttctatcttttaaaaacaattacttgctaatcgagctggcacaactcttaatcaactggccctaggaaggtgtggtggttgctacttgcaccagcgccattggccgtaatgggcttcacatagcaaactgagagggcatcctggaagcggttaatatgagtcctacgacgtcgaccatttactttcaagtggaagtacttagtgttggcgttaccctctctcatgtttttgaccctggagatttgctttttcctagccctctcaatcaccgagtatcctataactctacgcttgagcccctgtcttagttgaaattcggctgaggagagctgccgagattcttgagcgatgtccagcctatggatgacctctaatgccattagaagcttgagcctatcgatataatggattgactccatgccctcaagtgcctagccgtagctgccatcttatggtaaagaattagcaccggttgggtgtgcgtcgtgggccgctgccacactgcttgtacctcctcggcaaagcccggtagctttgtccagaaattctcgaaacggaagggtctcggggccctaggcccggaatggctcgataacaacagcgggcagtggtcggagagggaggtggacagcgcctgtagcccatgttgttcaaaggctaagtcccgactctcgttcgcgaagatcctgtcaaggtggcacatggtcggccggcgtctcttattgctccaggtgtatttgcggttctgtagatgtatctcccggagcttgcaatagtttagtgctgcccggaactgtcgcatacggccgtggtggagattccggttatttttgtcccgtgctctgtaaatcaaattgagtcaccgagcagtagccatttgttcccctcgtcaggcttgcatcgacgtatctctcttagaaatgtaggttttagcatatctctagtcagcccatagactaccgtcatgaggaacgaaatgttggagtctttcagtgttaccatcgccgagttggagaagcgcctgatgacgatgccttgcaagtccacgaagttactattccagagcattaaaattcctcctctagttctaggtggtacccccccgcaagaatgcagctaggtggctgtcaacgttgctcaacttggtctcctagaagcatgctatatggcagggagttgaggagagtagctcatgcacagttacacaccttgccgccgagttcaggccctggacattccagcagatcatatctaagttaggtgtagcgatggaagaaagcaaagcatcacaatatttggcgtggtaaagcttggcctcaccaccggagctgtcatctcaggacacacacagcacaacatttctggacccgcagaatgtaggagcataggacacacagaatacagtaattcattacaagcagaagttttgaaggcggcaagcagatgctccatggtcgaccaaagacacagctgaccgagtcagatactcgctagagacatcgccgcaaaacagattgaaagaagggcaacatataggaaactgtagaactcagagcagtccgggcaccaccactatgccccatcgtcctgctgtacctccgcctggaggccgtcaacctcctgtcccaccagctccaggagtgcatcgctgagcgattccatgtagtcatcgtcgaggctgaacagcgtagagagggcggccaccacctgttccggcagcggcccattggtcatggcgacgtagtccgcaatgaccttctggatcgggtcgatgtcgatgctggggaggtggagcttctggcacaggttgatctgcgcctttgcctcagccgggattgccggtttcttggccagacgtgtactgcgtcgtacgatcgtcatgtcgtagacccgccggatccaccgtagtgaaattttctctgtgaaatagattagttattcatttagttcagaatcaaaacatttgatttgacaaattcctgcaacaaaaatcccaagaatagaattattacattaattacatttagaagggagcttttttgttgagtgactgacctctttctgaagataccttgtggattattgctacgtatcaaatttagttcgtgcatttccttccgccatgatgaaatccttgttcttgccataaatgtattttatgcatgaacaacaaaatataacaatttggatatgtgaatgtagatggtactggtatattgactggcctgatttggcatgtgcaaatgacacaagtagaacaaacaaagagtcaaactcatatgtggttaaaaatacagttccaaatagtgctttcactaaatacatccggactatgcattctttgggtaccatttctttattccgctgatgtgtggttgtgaaacaatgatgtagatgcacattaaaagccagtatttcttttcaagtggcagatttgtcacacgaggataatactagatagtaggttcatctgcgtgtaatttgtatatacagcaaaaaatgtgggaaatgctgcagcggcatcttactgattttattaaatgattttctcacataatgaatatggttaaagctaattatgtatcttgatccagtactgtaaaatgtggtaaataccttttcgccgtaccaatcctactgtaaatcaagttactccatgtgtatgatctgtgtcaaaatctcaagtaaattttagctgcagtagctccgaagtgagtctgagatactgtcttttctcatgttggtaggtcacacaagataacatactacaccatatagaatcatggtatctttacttaccttcttgaacctgtaatctgtgtgaatttgtgcaccttttcgcatgtctttggcttgatatatacgccatttgttatccagga

SEQ ID NO: 14722 - DNA, 1007 bp, Setaria italica
  Intron number 1 from transcript Si009236m (locus Si009236m .g) derived from phytozome v7.0 (chr-ID scaffold_7; pos 34 944621 to 34945627)
gcagccagaacgaagcgcgccgacgatccgtccaggtaccacttgccgctaccactcactagccaaccttcaccaccctgcttgcttcccttaccccttccatagttccatgttccatagaccatagccatgccctgatctctccccaccggccggccggccggccctccactcttcatccgccatcacgtgacgctttctgcatctgcaatttttatctagaccttttcgagtctaccaaacccattctccctttccagcccttgtagaataattaaacccattctgcctaactgcatctgattcatcgctatctttcctgcttaccaatgtgcatagcactgttgtggatagaataattagcagttggtctcgtcttgccaacagatcgtgacgccgaaaaagtcctctcgtcgaaatgtccgcacgggaatatgttcgcgatttctcaataacggattcggaaatattactcagagcgtttctgttgccttcccatattagcccgttctgtttccgtatgactgccttctatacgggccaaccatccgagcagggcccagtgtgactgcgcgacctcgaggaagcttccaggaagcaaccggggcataggctttctatctggctgtcaatgagaaccacacatatcataattcataatctcctggacatctaaaattgtcctagtttaatgccttccacatctattatagcatttcttgtttgtttgacctggagattccagcattttgtcttcatttaataatggattagtatatatgctctagatttggcgcataggttgggtacacatccatttctggaaaaaaaaaagtttttgctacagtatgttacaaaactacaagtacctgatatttctctatatctcatatcttatatgtaatggaagaaataatgtctcatcctacatgcacgcggctaaagcatctcattctttttctcgctcaccaggaaaatttccgtaatttccgggtcgctctctacgt

SEQ ID NO: 14723 - DNA, 1219 bp, Setaria italica
  Intron number 1 from transcript Si026031m (locus Si026031m .g) derived from phytozome v7.0 (chr-ID scaffold_8; pos 40 623767 to 40624985 reverse strand)
tggaaattttaacaattagaaacttctgccttaaggtatttctctttgctacctgttcctctttgcaattagaatttttttcccgtccagactgctgaattagtttgagttggacaatgcgtacccaaattaacttttgatggtttgattgtatatacgtaagtagaagagaagacttatggtgtcatctccagtctcaacttttcaggaaaggaagacctgcaaatatgttagtagatttggtaggatactttttctaatattcatgccaagtcaatattggatcagttaggtattatccgcacctgttaaactacctcatgaatattgtgccttggcacccaaatcatacctgaacgctgatggcgctgatactatgcttcatcgccgtttaagtgttggcagatggtacccttgatagcacttctagaggtcaggtcattgtgcgtctcaaaagaaaaggggggatcacgatacttctggcacatgctcacagctgggaggcagtagtagcaagagggcacatgctcacagcttcttgttggtggttaggaatctgggaaacaagggaaagctcaaactgtttgtgtcttcgatgtatttgtgcccaattattggttaaaattgacatgatccatggaagttatgctaatgtagattttaaaatatgtgttcttatcaatggcaaaaacatgcagctttctctaaccaaccggaggatataattgtattagttaatgtttggtctcacatgtactccgtgttctatgtatacccctcttcatctacaactataatgattgggttgtttcctagcctttagtaatttctgacatcctagtttcatctcttcaattgcctctatttaattttccttgctatcaaatacaaaattacaaagtacatatggtcataagaaaaaaaatacgaaaaactacacagtaatatctatagtagagtgagcactacagaacattatagaaaacttgtaaaattcacatattaggagattctgctggtctggacacgtgccgtgcataggatgaggcttgggattcaaatgggaagaatgctggttcttatgctacactgatgtttgctttctttctttctttttttgtttcaaactgtgtggcaatccttaatactaatggtcactttgtttgggtttttatggggtacagccataccctcaggccttggtacacctatattgtag

SEQ ID NO: 14724 - DNA, 3750 bp, Setaria italica
  Intron number 9 from transcript Si029405m (locus Si029405m .g) derived from phytozome v7.0 (chr-ID scaffold_2; pos 16 153582 to 16157331 reverse strand)
cggtaaattgactactctccatggcttttgtggcagaaccgccaaattaaaaatctaattaaacgtaatggccatcatttgaacacatcaggcgcattaacttaatggtttaatctgacagcctgcatttaccaatatgcggatcgaaacaaacaccagaagtctcacgcgcaggtgagcacagatagtacatacatgacaaagttcgtacatgtacgattagtgcggtacattgagttttacaaaccgagttcaaataaaaatagttgaagagttcaactagaattaaaatcaagtaaaaaatagttgaacagttcaactagaattaaaatcaagtctaacattattgaagtcgaaactacgatacacaaagcgaatggtagatcgcacacttcagcccacaagtgtgccatctggggccaacaagtgactaagcatccggtccagtgatttcatcggcatcacggcaaataaacttagtgcaacaaggatagaaatctatgtcatccggacctgaaataaattaagtaacaaatcctgagtaactagtactcagcaagacttacccgaccagatgactcctagctagcatgcaaggcttttggctctgaggtttgttttgccaaaaagcaactaaaagtaaatccttactttcaatattgtagccaaattaaaatgagagtagctattttctagatttgcaggaatacaacaatcaatgtggatagataattaatcaaacaacaatattatcatcatcataattccacttctttactacgaagtgacgaagtgatcgaggttctcttatccgagagatacggcaaatcgattcgatttaatccttgcacggaaaatctaaccacacatctcgcgtgcaccacgcaggccacatgttggcagcctttcccagtcttcactatcgaatgtctgaactgccccaccaaacctcgttgattgagccctacgtgagaccctaggcgtacctatgctccgcggccacttaaactacccgggtggtaggtaggagttcacaccccgctgccagtcaggtactacctcctactcccagtatgtgattgacacaagcggggtcatactatcatataaccacatactaatatcaatgttcccatccccacctgatttccagtttcaacatgtgatctagtctcaatatttatgccataaataataaatagacctatttctcgcgagtgacaggaaattacttatcttctaccgaacttaattaagcatgacggagctaatgacctacacatactagtataaccaagggaacctatggatcatgcatctatggtttcatttaactcctagaaacataaatgtataagtacataaataagaacactgtatattttggaaaataagggttatactccggggcttgccttcctactgctgctcaacgctaggatcaaccaggtcttgctgctcctctagtgttccctgcggctctagtgcttcctgctcctcccgtggttcagccaccaactcgtataccgtgtcaacaattgcgttttctacatgaatgcacatgcgatgcaagattaaatgatgttcataaagcatacaacaaagagcagccatttatcgcacataaaatataacaaactatgcaagaacagatggaatgctacaaagatgaggctcagatataaattttaccatggtccgaagtactttcttaaacaagttatttaatctaacacaaaaacatatccacatttgcataaaggaagaaaatggctaactagtaaattcttatgttttaaacatgagacaactagagatgatcagtattatcaaatctcagaacctaaactgagttattaacactataaaaaaatcagttaaaattttccagaatttaaattaatagaatttacatataatcatttgatttgcactatggtaaatgtagataggagcaaagaaaatgcattacactaacttgtgaacacattatggtcatgaacaagatatagcatggttaaactactgaaaaagtatcttacattaatttaccaagattttatataaatagaaactatttataaatataagatcatgtcaacatggtgataaatttatttaagcatcatcctatagtttctggacatgaaaacttgacagaaactaatattctaccagaatactttactattaatttatcatgatttttggattaacagaaatatttatacacataaagcttttttaagcacacactaatttttaccaatggaaaaagagtcatttaaccatatatatcatttttcatttatgaagaagtccaaaaaaagttcaacaaaagttttttcacattttttacatttttatttgatttactatgcattttacaagttcacaggctatttaatcattttcccgaaaaaccaacaccctacccaaacttttcctagtcagctttgcccagccaccctcctctacggtcgctgacgcgtgggccaagggtcaacagatccaggccggtcaagaccgagtcgaagccggagttcaccgactttgaccggcgatatctcttcggcggtgagccgtcaggcgacgacgacacgcccaaggtgatcaacgacacgaggcgcatctacccatgtgcttttcgcgcacgtacgccagtcgaagcatggcctgcggcgagtggcggcgtgatgggggcggcgacgcaatgaaccgccgcggaaagtagccggaaaagcgaagacgagggggatatgagcatcagtgcatcgtgcgtagctcaccaagacggtcggctcggggagaggtggtcggagctaggccgtcgacgtgagggtggccgacggcagctcgcggcacccggcggacggggaaacttcaacccccggccgtaggagccatggccggcggtgaggagtggttgaggatggagttgggaggtgagggaggtccggttggctgcgatttgattttggtggagggagaggggtgaatttgggccgcgaatcaaaggtgctcgactcggctctgcttttggattggccctgctggaggaagaagaaagggggagaatgaggaagaggaagagatgaggccggcgacgtggaaaggataagcttgcggaggacgtcgcccatgccctaccggccagatggcgcggactaggagcagggcccaagtacggtgcaaggacactgcaacaatgaggcaggctagcgagggcgacgctggcgcggacgtcggagggatgggcaggtgccaggcggagcaaggatgccgggtgtcatattggcgcgcgcagggccgtgtccagctcaccgcggaaaccggcgcgtggcgctggcccagttcgccggccggccgattgccgccgcgcatcatgcgggagctaggacgaggaacaagttaaggtcaaaccaatttgaccgaattttgattgaactttgaatttcttaaactggtttaccaatttgatgatcatcctaaacactagaggtgttacagctttcatatgtaatcctgctattcattgagttaatcttcaattaaatgatcaattgatgatgtacacttactcggggccttcaattagtgatctagtcgtatgcactttcctttccgctctaatagttgcattccgcattgatatggtccaaatgcttgcattcaatgtttggtgaaatatcttagcttctgattctctgtaaggtatgtctgacaaatctatgttccacttccaggtcc

SEQ ID NO: 14725 - DNA, 409 bp, Setaria italica
  Intron number 1 from transcript Si022242m (locus Si022242m .g) derived from phytozome v7.0 (chr-ID scaffold_3; pos 14 241857 to 14242265 reverse strand)
tggctggcagtttttcctgaaggcactgattatacgtaagatctcttcccattcagtttattaccacatttctgcctaaataactggcacaatttgcttctatattttgggcttctggaaggatatatccagtcatcacttttatgaattagtccttctcgtaacacaggtagcctagactccaggcatggattctctaaaattgattttatgtatagtagatgcatgtacattgtctagactctagatacatgctaattgtcccatctcatgcacaacaacatcctgcacctgtgagaatctgctgtactgtatgccttcctttgtgagaatctgttttgctttgtgcctgccttttttatctatcagatgctaactagtgattatattaatgtctcagtgagaagaa

SEQ ID NO: 14726 - DNA, 876 bp, Setaria italica
  Intron number 2 from transcript Si037693m (locus Si037698m .g) derived from phytozome v7.0 (chr-ID scaffold_9; pos 82 72147 to 8273022)
aggtaatatagcattttggttataaagatttgcatctcccttgatctttcaatttcatattgctaaatcatcatctgtctaataatttatggcattctacctgataagggatattttgcttacaaaaaagtttcagttggctgaaaacttattactggggcatatgtctgtttccttgtttctgatcgcagaaaactgctctaccactttctagagtttgtttcactgattccctccttttcggtgtgtgggtgcccatcccactacgctccatcctgcagtatgcatttattggttgattccccacgaaactcgattcatttattgtggttcattagtagctagtgttcaagatagtgttctgatactctgccatagcggtaaccttttaaaaaaaaaagatactgccatagcagtgagattatggagatggtattggaatagcaattttaacaggaactgccatattaatatatttatcccaaatttggttcggaattggtcccaagcttgccttgttgctggtgcccagtatctgttcacttaaatgctgatgccgagtgcacataccagtactatagtagtgagatgggatctagcatgtggccttccaaacaaagttgaagccataaaaagaatgagttgtgatcagatgagccaccgattgttccttcctgcccacttcttgatgcatacgtggatcagcaactctcgtcaaaagcatctaacaagtgttatcttatcaactaatgtcatgaattttctaattatatatgcctctaaatgattctgttgattttcagtaattttccactaactttatcctcacaacttcctgtagtttctcagccttcgacaccttgagaggattgtttg

SEQ ID NO: 14727 - DNA, 1275 bp, Setaria italica
  Intron number 1 from transcript Si021730m (locus Si021730m .g) derived from phytozome v7.0 (chr-ID scaffold_3; pos 38 055126 to 38056400 reverse strand)
agttatcatcaaccagtggtattttagttgaccaggtaatgtattataactcatttccaatttctgtaggggttgactaactagggagcatgattgttattggctacatatagctattagtaaagttttattcaaatgtttgtcattggaaactaccgaaattaaattataatatccatgtccttgctgtttagtcttatccgagaagaatttcagaaataatgagggttatcatcaccaaagaagcacaaaagtgttaaaagtgagggggagaacatgatgattcttgggccttagcatagcttagtgagtggctaattgcaacatagtgtctcattgattgtttcaagcgttttttttttaattttactattgattttgttgtgttttctaggtttgaatcactctgaggtagataagtgaacaatttcctacaaattacagaaggccttcatgtaaaacatgtttgcttgcattaattaaatttcatcatgtaagcatgactggcgatctgaggctgttggcatattcatagcatcttcctgttagattctgacaatcataatatataaggttcagtaagttaagaaccagcctcagatcgcaccgttgattcttaacttgggatagtcatgccatgtaagcatctggctagtaaagttgttaccatacaactttctggttgctaaaatgggtttcacattgctaggcttgggaaacaactccagaaccattgggccaatcaggattctaatggtttgcacccagctatgcgaaaagaatgagaaaaggattttaccgctttacttcatttttggctagcctccaacaatcctaaaaaacattggccaaaacctcctgatgtaggaagtgcttagaaaacttttcctatgtttcttagtaaaaagatactaggatgactctacctgcaagttgaccacataacaagcctaacctttcatgctatagctgtatcttggcaatttgttcactatctattgttcatgtcctatgatcaactatcaattagcattatgtcaatcttttcctctgaaaatcagggaaaaattagcagcatacagaagaaagcgattcagcgtcttatttctgagcaagtgaagtgcaatatttttaagattgggcaaaacttctactcacagcaagtaggcattgcgcaaggaagcaaattatctcccaatctttgttccctgtactatggccaccttgaaaattctgtgctctcaaaatttctttatgatggcaagattaattcag

SEQ ID NO: 14728 - DNA, 2274 bp, Setaria italica
  Intron number 1 from transcript Si017441m (locus Si017441m .g) derived from phytozome v7.0 (chr-ID scaffold_1; pos 36 738637 to 36740910 reverse strand)
caatcaaggcccgcaagcccaacctgaagaagaccgtaagcatccgtctatttcctcgcgtgtttttcgttcggctctgaaattagctggttaggtactgtgatgttggtgtttggtacgcttttggttggatttttggtagtcgatttgtgtgaagtgtgaactggaagctggtgatttcgattttcgagcttagtgtttttttcttaagtattcaactagctcgggctatcaggtgattcagtgtggtttgtttgtcacctcatctgcatacggcgaggctagtttcatgtggggttttacaatccttgctcactaatgcgtcgatttgatgagtgctttggctgatgtgttgtttgcttgttattatgattttcgtagaatctagatggatctatctccaggtagtttagggatgctgatgttttggctctttatgccagttataagtgctacttgtctgcatctagaaggcctcatatatagctagttaactagtgaagattggctcttattgatgtttcagtatattctgtttgatatctgaatcgtggcttggggtttagacttggcacaggattcacgttgtgctattgggctctgcgagtctagctttagttgcagtttggcgtttttgttttagatgtatatgttctagttttggtttactggacacaagtgcccatgaattaattgatttaatacattatttgtctggatcccatatgctatgcaatttggattgtgcttacattcgtgtatccatgtttcaattcagatgctaaagttaaatgtgcatttgcacatgaaatttatatgactcctctgcttgttgttagggttgtgtatggttatttgctgatgttatggttccttctggatccttttcatgaatcgtgttttagtagtttctgtaggacacctgaattatgttttggggatttatggacatggcccaggaattcactgtgcactattggcctttgtgagtctagattttgttctggtttagtgtttattctttaactgtatatgttctgattatgtttgactggactgagcccaagtgcccatgaatttggtactgtaatttagttttttgtatgggtcctctcttccatgtaacttacattttgcttgcaagttccgcaaccctgatccatttccgtgcttaagtttagggggtagttatacggatgttatatgtttttttctcctttttttaaggttcgcacacagatacatgcactcaacacaacacatcatgcacacatttacatgtgataattattcatatgcaatattctattctatgtctgatgatacatgtgcacatgctgatatgccatctatctatgtgatgacttactttagttggtttaaaagccacgctcattttcttttgtgggcattgttgatattccaaattttctgtcctaaactgttaatatgtttctatccatggtttgaatgggttaacatatattggttgaaagctaggttttattttttccctgattgaatgctgttttcacgttcccatttgatttgttatgccctctgcctttttgtacttggtagaatttgtaacgttcatatgaaacttcacgatgtctatgcatcagggtctttttcatatttcttaggatgttactccttgtgtgtctatcagtttagtccaaactataaacattcctgttattgttttacaaagtgttaccattgatcatatgacatgatgtacgtagctgatgtttgggaaaaaaaggtaacaaacaagtttcatgtctctataagatgttgccgaatccattgttactgtgaaggtgtttaggtttctgctctgttatccaatgtgaatggtagcatctgaactgttttaactatgcaagaaattcattgaagtttgtatcactccatataatgatataggcacgtttcatgtgattgacatgttattgataagtgaaccaaaatgattttgactattgttgtatcccaaataagcaaatattccttttcctatataggctccttgagtgggtattacttaacttattgttctgagctagtatcgccctttgaaagcatgttattcttgaatagttgcaacttttgggagatattattcaatattaagaatattgctttgcttactgtgtgtggcttgcttatgtaagttgggtaggtttttactaattgatcctttttattgctaatgactggtatattttaccataccacagaccaaattgaccatctgtgaaggagaag

SEQ ID NO: 14729 - DNA, 2230 bp, Setaria italica
  Intron number 2 from transcript Si003482m (locus Si003480m .g) derived from phytozome v7.0 (chr-ID scaffold_5; pos 18 144060 to 18146289)
cgtcgactcctcctgctggagctcgctctctcaaggtaacccttgttctagctgctaccatttcaggggatagtaccatgttgtcgagccttcttggatctgttgtcgattgctgcattctctacaacaatttcgtgtgattgtgcatttttgagattttggggttagcaggttgatgattgctgcacgctctgcaacagtttcgtgtcaatgtggatattgtggttttggggtttcggttcgattgaaggggaaaaaatggcctaaagctgacctaatttaacacaactatgcattctcgagaaatgctgtaacatttttccagcatggctacatcatcacttctcgaatcaatttcaaagtggaccaagtaattcacgagctgagctcattacacagtacttactttgtttgtactgctggtacaccatataaaccaagatgaacaggatagttggtaaggagggcatctttgaatagtggtctgtcctgagaaactccttttaacctttttttattatactgaaatacacgttaatgttccttcctctttttggtttattaacaattacttttatgagtcaattgtgaccatggaactgtaaggtagtcttgaagtgccttggttcattagtgtccaattgtccttccacaaatttagttttacatcgatgtccatttgtccgttatattagcagtaagctagtaggtttttttttcccttcgttccatgatcttagggagcctttttggcctaaaattattgacctatttcaaactctggatgatctggatgtgtatggttatgaaagaagttgtcttagctggccctacatcagagtcatcattgaataatttgcttttttttgtttgagatcatgtttgtggtagccattgccttattagtgtgtgttgattccgacttattggctctcagtgcaaaacggcacgttaaatttggaaacttgtgaacttccatacccgccaaaaaaaagaacatccatagtagtttaggaaacttttgtttcttgaacaatgtaacaaaatttgatccagaaggatctttattgtgatgaatagtgaatttgttcaacatgcctttcagagttccactagtgtgaagaacttaaaatgctagcagttcatagcaaaactagttccgaaccttgtattgtttcattttatatttgcttgatgcttgtcttgcttgttactataattcatactgtatgattcattggggtctttttaattcaagtaaaaagtttggttggcatgcctgttgcaatggcatcacggcagcatccaagtggtaactacaaagaatacaatctttctaggattagtcattgcaatcatgttgattgatctcctgcttccattagttgctcgctttatttgtaaaattttaataagatctgattttatctatatagacttgcaatttacatgtggacaatgggattgtggtcctgtagactccttggaataaaagtgatacaaatgtcatcctggttaggcagcaagatatagtgcttccaaaacatagtcccataaataataggagaggagttttagttttgctgcctgaggtgctattgttcttaacctctcaatgcattttgtgttttacaatatagcaattttacatgtagatactatgatggtagctctgtagattcatctggacatatgtaaaacattttttttccttcaggcagcatttttttgaagcagtcatagtagtactgttaaaacattgtccccataaataactggaggttaggtggtgtccctctttgtttctcagtaatctgtatcatatgctgctgctttcagaggtgcatttgtctttaacaagatgggctaatctagatttggctgttatcttagaattgaatttggcattcttatgattctttaaatagttgagtgatatgctgttatcgaaaaacttgtttatcgaaaaacttgtttgtgaactttttttttcatcagatgttttcagcaacacatatttctttcacatagttgtgctggctgctcagccgcgaaatactgaatcaatcagttttaactaccaggtcttactactatgagatccttcacgcttgttgattaaattaagctaatgaagaaaattagttctctattctttttctattgaaaaaagatggggtttctatattttaactgtggttattataggtttaaacaagcgcatctgatc

SEQ ID NO: 14730 - DNA, 1594 bp, Setaria italica
  Intron number 2 from transcript Si018234m (locus Si018234m .g) derived from phytozome v7.0 (chr-ID scaffold_1; pos 30 548450 to 30550043 reverse strand)
gaggacgagttccgcacgttcggggttctgaggaggtgagatgcagtgcctttgctcgaaagtgctaagcttctttttcttaaattttggatggcggaagtgctaagctagtgctactgcgcatatggttttcccgagtcgtctatatggtactgtactactgtagtactgttaatagcctataggactgtatgagcttccttgttctttcctttgccttacaaggatgataagtagtttgtggctttgggtattgtatagttttgcaccgagggtgccagtggtacaacagcaatacagcagccagttgcccacttatgtgatatagaaataagtaaggctaatgtggtggagtgattcaacaccagttgcgtatgtatttagtttgttgagtagaacatgttttagtagagttgaggctgtttcttatgaaccttttttcagtaatgcatatctactgtttgagaaatagaagggaaaagtgggattactatgtgcacatgtgaagcacatggagcacctgtaaggcctagtttgttagggcttggtgttttgagggttctgcatgataagttagcaagtgcggttttaacttatcagtacatatggggcttggccttatctatttagcctcgctagtagctccgttcaggttgtactaagcttaagacgaactttcagtgcagacttgcaaacccacttcatgtttgctgcttccttagtcagttactgagttgcagacgtacttgagcttcttttcttttaagaggcttgtgattgtccttttatgtaatgctagggctcctttttaaagattagagggcaccttttgctcattcagtgagctagcattaaagttattgttatgctgcatgtgaataaaaagaacatagtagaaagtactaggtgaacattacgagtaaggtggaatgaacttgaattacgatgatagggcaaaagttggaactgtgcaagtaggctagtagttctggagtgcatccaacatggcaacataacaacattatcttttgacctaggaatttatgcctacaatttataaataaaagtaaactgcagttgatgtaataatagatgatactcctctcatgaaattaatccagaatcacatttcctcaatactccctccacttgaaattacaagacttatttcatttagttagggcaagccattgaccaacaattactctattaattgatagtttttgtgacacagaattgatgtcattagattcatattagaaaatagttacttatgattatacagagtgatatgtacctctgtgcagatgggttatatgttgacttatgcaacgataggtatatattcagagtgggaggattccatgaaagggttatgtatgtcttgttaaatgtatcaggtagtttttcttgcatttgcatgccgaagtgttatttcttggttgctgttgattgagagtatactaagtcaaaaacttcgattgtaaagattttttgtttgtatgccattttttatcttaattcagtattagatattttgtacgttacatgattagaggaattcacttgtactgattttttttcaatgcagtgt

SEQ ID NO: 14731 - DNA, 1527 bp, Setaria italica
  Intron number 2 from transcript Si031934m (locus Si031934m .g) derived from phytozome v7.0 (chr-ID scaffold_2; pos 42 2144 to 423670 reverse strand)
atttcagagaagaaaagcagtgcaaataaagagatggaagtagaagtaaacaccaatctggtgacttgaatgaagaaaattttctagttgttattgagcttgtgggaatattgaggagagtgcatggagaaggttgcattctgcttctcaaagtagcatcccatgaggcagtaaagttataataacaaatcggtcagagaatataataaactttggaacaaccactaatatagaactgacttttgatgcgcccccttttaatcccggtttaatgtaggcccgagagacaaggaggtgcgcggagctttactcccgttagtatttgcaaccggaactaaaggcgtccttttatcccggatcaaaaatcagccaaccgtgggggactctttagtcccgagtgaaaaaatcagctacccgtgagggaccttttagtcctgggtggtaacaccaaccgagactaaaggtcaccattttaataccagttggtattaccactcgggactaaagctcacaacaccaaccgggataaaataggatcttttatcccagttgaaaacactaaccgggataaaagggtcccccacggatggctaaaaaagaattaaagtactcgtaccctttttatcccggtttgtaataccaaccgggataaaagggggttttaatcccggtggctaaaaaagaactaaatctctcaaaactttttatctcggtttgtaataccaacgggataaaagggggtcttttatcctgattggtattacaaaccgggataaaaggatcccccaagatttagtacaaaagaattgcctcccctatatagtcagatgtggtgtgtagatgggatggatatgcgcgaggcttgaggtcgtgggttcgaatcccacggaccgcgcacgcgcatatttcaggtgaaaatcgcgtgacttgtgacttgcggcgcgtgcacgtgtgggggaccccccggggatttattttttgcatttttttttgcaaaaccatttatcccggttagtattactaaccgggataaaagggggcctatccgcctggcgtcccagaccctttagtcccggttcacggacccgggacaaaaggcaccccttttgtctctattgtgttttccggattggttttcgggaaattttcaccctaccaaccgggactaataccgagttttctaccggtgaacacaagctcttaacatgaaatttttgtctcgtgtgcaatattggtacttctttagagctcttgtgtttggaaccaataaagatcctgaggagtaaccaaatctaacatccatagcagtgaggatgatattcgaggagtatttccgttcaaaaaaaaaagtaatgatattcgaggagtatttcgaccaagccgtatatgcaccattcgctggaccattttcagatctaaacaacatggcaaaccttctgaaatctagtgttgccatgcagaattggtgcaggattcttgaatgcatgagggagaacaggaagcaaaatgaacctctagaaaaatcct

SEQ ID NO: 14732 - DNA, 608 bp, Setaria italica
  Intron number 2 from transcript Si003115m (locus Si003115m .g) derived from phytozome v7.0 (chr-ID scaffold_5; pos 43 243366 to 43243973 reverse strand)
actacctgcttaatcctaagaaggtacggctagcattcactctccgctctgataatttcattcatctattatcaccaaaacatgttgcatccacacatatggagtgtacgctgaatgtgcagctctgccatgtatatttgcattaagatatgtcagtgttttggccagtctgtttgttaccatgtacctgctgtagagcacattgctaagtatggaatgcattgcaaatctttgttctcagttgaattggtagcaccctggaagcttactcctgggattgtttagtctatctgttttcaagctacagtgtgatacagaatcagtgatatttgctattctagtaccctggagaggaaactagtacttgcatctcattttcatatgcctccagaccctgctctctgtaggtattcattaatctagaacagcttgtatagttactactagttctagctgtgaaatgatgaactaccaaacattaatcctctggttttgcatacgatttgtcatatttgctctcttgacgtgcccttttttgatttaatatgatttcacagcaacactaaaactattctgttttttctatgcagtacattcctggaaccaag

SEQ ID NO: 14733 - DNA, 479 bp, Setaria italica
  Intron number 6 from transcript Si000918m (locus Si000918m .g) derived from phytozome v7.0 (chr-ID scaffold_5; pos 22 17606 to 2218084 reverse strand)
attcaaggataccaagactccggtgttttatataggtaactaccaagaaatactatatgttgtgtttcttcccccttttttctaggggaaaattgtaaaagtcccatttgtcaatctgattttgggatcccaacatatggcgttttgttgcaaacaaccccccccccccccccccctagtttgcttcattgcaaaaactaccccgcaccatgtatagacatctagccaggttcctggtttttgctgacatttcttttactgttcttacctgatattcttctgcagtaattctgtctgttgtgctgtcgaatatcataaaatcaatcctttgcgctttaaatgtggatgctgtttataagcaagtttcatttgagctatattgttccagactattgtctgatgccatatccttatattcatccacttcattttcataacctttaggattgggtaatctctctgctgtaatccttcttcct

SEQ ID NO: 14734 - DNA, 769 bp, Setaria italica
  Intron number 4 from transcript Si000056m (locus Si000056m .g) derived from phytozome v7.0 (chr-ID scaffold_5; pos 13 055339 to 13056107)
atcaccaaagagaaaagagatctcagaaaatcaaggtctactcttcattctcagtatctgaagttgatatttgtgcttagttagctctcttgaaattcagcacatgttacacataagaacatgaacaaccaaccggccaaccaatctacgtgtgatgttgaaccactaagcgaacagatttataaattaatgggcacaatcattttgtacttcacatccacttcagttcaaaatcagaatattgttcttgggaaatataatgatacatgaaagcatctttcacttttcagttttgagataccgtatgggatggtatcatcatcccttttatccttctaggctattttctcatgtaagaatgaagtagctactccttaaaaaaggctgacaagaattggatttgtcgttgtgcttgaatatctttagaagcataacttcataaagggttaacctatgaggatatcttgataactgataaatgcatcgctgagtcactttgcttcattgcttctgttaccaaaggagctcctttcctgcttcatatttgctttcataaatggttaatctacgaaacgataaatggtaacttctgaatgtattactgggccacaatgctttgttgcttctgttactgaatagttgtggctccctgatgttttgtgctagtttggcagatgtaatcttttgtcatgttggggacttgcttaaagacttaatagagcttatgaacttgtacagagaaaaggatcgcgactaagggagccatatc

SEQ ID NO: 14735 - DNA, 1310 bp, Setaria italica
  Intron number 13 from transcript Si019921m (locus Si019921 m.g) derived from phytozome v7.0 (chr-ID scaffold_1; pos 8 057816 to 8059125)
ttcacgttctgtttttgttatcttgatttagacaagtaacattgcctatcacataagtttcgcataacctaatcttaattactatatggaagttaacctcaacaaaaacctcggttttatatgctctttgaccctatagccttattttttttattctagaaatcttacatacataattctatttccaggctgtccttttgttgtcaaagatctcaagtgaccttgctggggaagcaatacaaagtgaaaagttgcatgatgctgttgatctccttctttccctcattgtaatgattcttagaaattaagccatactgacatgatttacattttcttagtattcaactcacaaccctaaaaaagtgccaattgctaaacgtctatggttttcttttaacaacacggcaaaacctttttttgaatgggcttgtagcccgtggcaaagcactaagggaggagctgagccagtagaggttcgagccccttgtgcccccagtctccaatgaagaccgtgcagggagcgccttaaaaaaaatccttttagccgtggcaagtttagttggttaggaaagagatgaaaactacacaaaaatttaatcatgtattagtaatactaataaaataaataatcaagtattagtaatactaataaaagaaataatttgaactgacatgtgagatataatataataatgttcggggcagtttatacaagaatgtttgggacagttgatggaagaaatgatatacatggggcatttttgtgtatagcatgaaattcatccttttttagggaaatacagtaggagagaacacaattggcatgaaagttatcatgctgatacaaaatgaatacgcccagccaaacttatggggttcggggataatgggactagttctatgtgagggaatcaaaacttacgtcattatggctattaatttggatccatacagattttggatagtaataaattttagaaagtactctctccatctagagatgtaaagcatattttatttcattaggacaagcctttgaccaacgatattctatggtatataacttctaaatacaaaataaattggcatttttacattcattaggtcaagcctttgaccaacagatactttatgggtatgtaacttttggaaacaaaattggtatttttacatttgttaggttaagcctttgaccaacagtagagtaatatgaaattcttgacccttgaaataagtatctttctcttgccatggttctaaccgcaaaggtcatctactaatgagtaatttctttacactgtcgaacaaag

SEQ ID NO: 14736 - DNA, 1793 bp, Setaria italica
  Intron number 1 from transcript Si016632m (locus Si016632m .g) derived from phytozome v7.0 (chr-ID scaffold_1; pos 41 032909 to 41034701)
caaccaagcttcctaccggcacatttccagtcaaggtatggcttgattatattagcttcctatattagcatgtaccatctcagttcaaatttccaactaattgcatcttgccaattattccaatcaaattgcatgcctatcatttttcaatcttctcgagtgggcagcaattgctctttgctactcaaaatattctgccacatctgaattcaatttctgtaccactgctaccgtgtagtctaaaattccatgctggttgcctgaagcatcattgttgtctgcctctgttgtgcctgttctgtgctcttccccttcgttatttctgctctatttttctgcatcattcgtttggatcactgttgtgaatagtgccttcttcatttcttacattatgttttggccgctcatgttcttttttcctaagactttttttttaaaaaaaatagaaagtattgttttggtaggaactgtaagaaagtattgtccatgttttagaactgctacatcttatgtgtgccttcctggtaatcaattatttgcattaataaggacacaaccataagatgcggtgtccacctcatgcctgcttggaaagaaaatacaaatttctctcataagaaccataggggactaagtatgcaaaactttgcttttaagctactgattctgttggtcatcatgcctcttggaataagtggaggtcgacagtttttcactattgtttcgatttacagttttcagcatgcaacatacagcactattgttttgattagatgtatgccactatattttcactactgtatgcaaattaccatgtgtgcagtacaatattgagccatagaatctagtctgagctatgtattctttcctttttcatctgtttgtcacatcttcgctattttgttaatcaactttaaatcctttaaaaacggctcgtggttggttgctcccatcatccagttttcaataatcttgcagatttcagaagctgccaaaaagatatctagttcctgtttgtgttttcaaagctttcttcttgtgcttgccatatcactcacccactttgtctcttcctccattccaagtcttgattagctggggcctactccaaaccaccagaaaactaatgccccactgctccctactgaccttagagctcaaaaggtagtcgatgatacatcctatattgacatttcctaaccactctttcctgaccaatggcactgcatgtgatatcttattatccaggctgagctaggagcactgctttattcctagtctatgcttatgaaatgtgatgcgtttatttatttatttgcgatttatgctgcaccttttagcatttttgtgtgatgccaacagccaactagccaagtcatatcttgcacttgtttggtcctttctgtttcttatagcttttcagaacaaactactaaatcaactggcacttttttaaaaaaaaaactgtgatacacacttttttttttggcatgtgaaatggtactgtagtgtatgactcacagagtcacggttgattgaagtaaggatggactgcatgatctcgcactgttcactctgtaaattgtgcaatgctctcatgaatagttcttggacacttttttttacttggagggcattctgagtggtatttttttttctgattaccactgatgagaatagccacagatgatagacacttcaggcgttaatgtctatttcccatattgatatctgaccttgtgtggcatcttatttcagattgccatccccattgttccaacgatacgtgtcat

SEQ ID NO: 14737 - DNA, 2359 bp, Setaria italica
  Intron number 1 from transcript Si031700m (locus Si031700m .g) derived from phytozome v7.0 (chr-ID scaffold_2; pos 36 270093 to 36272451)
cggcaacgcgtcctggtagactgcagcggcgggaggtgcggtcttctctgctactgtctgtggtggtcagattgcaaagcttttagggatttattacttcgctttagaaagggtagagcttagtgactttgatagggcttataagctactctgcatcatgtgaataatcgtagatttgtgagggaaggcttttgtgtagcagtagtgctcttaagattagtgtagtgttcagcttttccaaatgcacagtttaattaagaacgcccaatttgctcaagcgttataggtcagaaaaattgtgcagatatgttagtcttgttgagaaattcttttgaatatcatcttgtcaccgctctgccatcactaacaaattgtcgttagcgaaactccgcatctggcaaaccaaccctttgacattagtaggattggtttcaatggaccacccattacttgtgaagcacttcaccggcagaaagtacatggaagctttgtgcctccatcaatctttccgcagccaaaatttacaattctctgcgcgtatggatatcttcctttgaaatcgcatacctaaaagggggccaggatgttacagtttagttgactcctttgcgtgataggaatgtctgtggaacaggttcaaattagtcatagccgaaaccttgatatgataaaaatgattgatggatatatttctcatcactttgtataggttctgaaaaggaatataagcacgctcatcttcagattgtttagaactcatttgggattttgagtatatttaccaagccatttgaaacttctattacgcaagaggttatagtgctcttccttttgcctgagtgtgggaagttaatggtggttgagtgcaagaaaagaaatataactaacactgtaaagatggagggatattgaaacagaacaattgtcgctaatgatgaaaacagtctcatgacctgtgaaaggtagcttctacctccctcatctaatatatagtttcctgcaagactgctaacaggctgcaaacttcaaagatcatgttcacattgctgtatcccatcttaatcagagatgtccttgtagaattacgtggagaatgtggacattgagctacactatatctggaagcttcatgtttaatccttttacttattccaacatgatgctgtcacaaagaagggaatcctcatttgcggatgtgtcccaggttcagggcgcttttatgttttgtgcaacagttttggggtgcaatcggtgtttctgtccttggtgtctaaagataggagtgttgtaacatttaaactcttatcccttatttaatgaagaggtagagctcctgccatctgtttccaaagaaaaaagtttattaacttgttcttaaattttgtgacaggtagagttgtaagttgaaatttcttttagtagtatatattgcttgaacattgcactacccaatctctttcacaatgcttccattttccagtgtgttttccttaaaaaaaaaatccagatcacagtaacagtatatagaatagtgaatagtggtctttgacaatgccaatttatagtatgttgagccactccagtaacttaaatagttgcattttatgcaaaggaagaccaaaaaaggtgcccatgtgactcaccatgatagaaatttgaatttttgcatgctgaacttctaattgctatgaggtatcatgttggtcaatctgttctctatggaagcacataatctgttccctatctgctctttgacattttgaacattgactgcaaatttattgcgcgataacattttttatatggctcaatgaattcagcagtcatgatccaaaccttttgggcatctgcttgaagtatttgtggtaaaccagcaagcagcatcagtagtgcagaatttattgaaccaataagaaaatgacattcttttggacaaagcattatggaatttaatttgagttggctggagtgatcgaagtacattgctcttgttgaactagctgaaaccttgctacataggtggttaaattttcagaattctgtatttgagttgcttcagcatatactgtactcgtgaatttctgcaagtaggaaaatctttgatattatactctagcaaaaaaaaagggaatattcagttaggctgtttatcaatactgatttgaactcttcacatgctaattacttagttctaacatctattgcttgccttaaacacctgtgacagttgtcagttttttaagcttgcatttggtggtctagtaattgatctgccaactaaatggctattctatcttcagcttgttgatcactacttgctgactgcttgcagatagttgggtgttccaagggcagtagt

SEQ ID NO: 14738 - DNA, 2268 bp, Setaria italica
  Intron number 2 from transcript Si018269m (locus Si018269m .g) derived from phytozome v7.0 (chr-ID scaffold_1; pos 91 0341 to 912608 reverse strand)
agcaagtgccaggtgtatctgttcagagtaaggtgagttcattcactctgctctgatctgctccttttgcatctactacctgccgcgttggttgcattgcatgcttttgtcggtgtcgcatttaccatttgtcctagggacattttgcatgccagtgcgtatgcgaaattgaaatgagattaacaactgcacactgatgaacatagcctgttcgtttcagcttatcagctggcttatcagccaccgaatagtatttttctctaaaaaaaaatcaaccgtttcagcttttcagccggcttataagtctagccgaacaggccgataattcgtagtaataaagtaactccttgtgcgcccaggcttacttatctaacaaattttgggctggtaagagtggactactgattcttttgatatgaaaatctttaaaacgttcctgaaagatgaactctttgaacctagtattaggcaggcaaactcaatttgaaatacccacttttggaacttggaaactatgacctcggcgaaaaaatggacatttctctctgaatgaaaaaaaaagaatttatttttacactcatgcccgaaaaaaaaaagactatcagatcgaaatcccatccatctagagcaggtcggaagattccacgggtcaatgagggatcaggacacaagccaaggggccaggtaatcgagccacatgctgacaatgcatgcgtggtacggccgtgaggtgtcgctgtccggtgggtcccgccctctctctgagcgatccctagcaagacaattcgtgccaccacacgagatgcccagcctccacagtggatcgcggagatgagagtgagcccaacgggacggctgcccagcctgccccactcccaagcaaaagccaccctcgattctcccagtccgatgcgatccatggacgagagagatcttgaaacgagctcagctcagcaagaaatttggctcctggatatgacaaaaattctccggacgaagctgaatgctcaggttcaggtagatgcatgtcgtaggtaccaaattttcttatttgacatacagtaggtgcatgcttatagcgtgtcgctactgatgcctagattcacgatccaacctgctgccggtcccacttcggcgagccaaatttttgtgggaccatcagggggtagctactgcctcccgtgtgcaaaaggatgtcgaaattttggcagatggcagtgccagcagggggacggacgaatggggaaacttcaacgggacattggatcctggatgagtggagcattattggtagcaaacaaggaccagtgtctgccttctatactatacccaaaccgccttacaagttgaatgatcagagcagagacaaaagtatggcacgacaattttgtgtgaaaacaattttccgaacgtgatcttgtgctctttttaatctattccagtcttctttctaatttatatgacagattcttgtttttacaaattatgtatttagtattgtttttgaaacttacgtatttagtattgttttaggcaaaattcaagggcagctaataaggttacgttcgaaatacgtattgtagtttctttttccaatttctttgcgaatggactgttcgagtgaatttactgtaaaatccatgttttttttccagaaatgccgtgatttttttcatggacactagttgaaaaaaaggaatgattttgtcctgaattgtggcacactgtagcattttactagaccactttgttttaactgtgtatataggtgagctagaaaacaagcaaggcatatcactgtattagctgcttaccacggagggcattattcagataaaacaacgtttccaaaattctgaataattggcacataggacaagctcgaccagcgtgtcagcatgaatctgatacttccttcgttccaaattgtaggtcgttttgacttttttagatatagtttttgctatacacttaaatatagtaatatagtgtatgtccaggtgcataacaatatctataaatctagaaaagctaaaacaacttacaatttgaaatggaaggagtactaacaaaccatgaccatcaactgtgtattgctactctgttatcagcttggcatttgttactacaacagtccatactccacagttctttgatgaacaacctcaaacatgctgaacttttgattcaggaacccaaagtgactgatcttttcgtgacaaaattatttcaggtttagcttgaactgaaggcgcatccggggcacaa

SEQ ID NO: 14739 - DNA, 1784 bp, Setaria italica
  Intron number 2 from transcript Si007411m (locus Si007411m .g) derived from phytozome v7.0 (chr-ID scaffold_4; pos 88 3787 to 885570)
ccggcctcgccgggatcttcctcttcggcggcaaggtactaaccctcgatccccttcctgtagctacggattccatcccagatcgcccgtgggactgcgtattcgtccgtttccgcccccgcatctgcgtggtttctgtacgatgttttggttgctcctgcgcctgtgctcgttaggttggtggtggtatgaacattggatccggttgatgcgtcggtgggggattcgcgtctggtgaccattgcgaacccgggattcggggcggattttgggtgcgatgcgatagagctgttctctgcagggtcagattcctctgtttagcttagggcggccagcaagtcctgattcgaggcagatgttatgtggttttaggttgctacatgccggtcaggtcaatgtgttcttgatcttcctgccatgctttgttgtatgttcttgcctgagattttttttttcttgtaagccctgttgtatgttaatctcaaaaaatcccttgctgtactgagatttttcttactgggtagggcaataggagattggaggcctgttgggacattctttagttttaaggattttagcatgctggattagattctggtgtgacttgcaagagttgatgctgatggttgggggtgtactctgacacttattcgttgatttcgtgggagattggacaatgctctacgtgcataagtcatcgaaaaattgagtcatcttgatgtgttacagttcacctatgttggtcaattcataagttcatatactcaggtgatgttctttcattgcatttttgtacttgttggatgcgttagtgggcgttcgacacatccagttttgttttgggtactagtatagctgtagagtataaagaagccttacatgtgtgtatttttggaagattaggtgctcaatgtttttttggcttccaagtttccctattgttttaatttccagcagaaaaggctcagtttgcctatttgtaaaaacacagtaaccgattaatacgttcttgaatggagtagccagcagtgtgggtagaactatggatgcattttgaaatcatgaactgtcaaactgagtattagaacaggtatcctaaagcactgtacagtcttgatgtctccaattaagatgatacttatgtattctgctgatttgctgtaggagacgatgactttcataaatatgattgtggatggaatgaaagattgccatattgactaagatttttgagttttgatgttggtagttttgtgcacgtagggattcagttgataattggtcatagaactgagttatataccgagtggtaggtctgttgatgcgtcatgcatgagatcatccaatacttgtgtagcaagaagattactgaatactcactccacttcttcattactttataggtaaattaatcttgtttatattctaagattttcaacatagtaacttggtcggtttcccatgtccaccaacttgtccaagctggtttatttggatgcctaaccagcatttaattatttttccgcattgcttcaagcgactcttaacattgtacaccagttcgatgagaaagaaaaatgcaactgtgtcagattgctgatatgcatgtcttgtaaccttgattgagatagcagccttttattaggcttcatttgtgtttatattggtgctagcaggtatcttaaaacatatgggtttctcttcccacgattggttatgatataactatattggttcacatgtttgcaggagaaattccaggactacctttgccgtgagggtga

SEQ ID NO: 14740 - DNA, 1387 bp, Setaria italica
  Intron number 1 from transcript Si025500m (locus Si025651m .g) derived from phytozome v7.0 (chr-ID scaffold_3; pos 83 50964 to 8352350 reverse strand)
ttggagcagcgacacgaggcgacgatttgttccaggtgcaagtgcaaatccccctacccttccgtccgcttgtaccttctatgattcaaataggtgtgcatctcttctgagccgattattatgtatcgatttcacagcggatcccgctttatatcatggaacaaactacgaatcgtgttcatttttttttctgtcgactactctagggtttcttcccattagcgcagttatatcttactggctttttgtcacaccagaacacccctctgatgtttaggttgataatctgggcagcttattacatacattagccacatcgtttgtcaggcatctgttgcatttggattatttgttaacttgtattgagttgaccagcattcttatcagtttttaacattgttggtgcatgatttatgtgtcaaatgcgctaagcaaaaacaggcattaataacttgaagttacaatcatttttgttgtttgtgctaggtactagcccctttttgaacgaaaacattatcatgatgattatttgtattagttagttctaattaggtagcttgacaactagctaggtgccttttttaactcagaattcacggtgcttataattttacccctttaaccattgatgaaactatactaactttttttatatgtgcatcaccttttctatttcatattagcaggtcaatttttttatgttttatctgagaaatgaagttgtttggtgccttttattattagaaaagtacggtgacatatctgatccacaccataaaacagagtaacttatgcgtttaaatagagaagtacacttgtgtatgatattacacataagaagtaactaatttgctgatttacatgagatatgaagtaaaccgcccctgaatttgaacacctagaaagtaactagtcctatatttgtattagataggaagtaacttgctctagcttcagtcacataagaagtaactagttatttatttagaggagataagatgttacctccccctttattctgctatgttgatactgttagcttttgtgagcaatttcaacccctgcttcatctatttagcaaatttcattgtgcgacattgtttttacatgaaaaaaaatagtttgcctccttaatagtgttgtgtcagtgatgtacaaagtaactccgtgcctaattttaaacacatagcaagtaacaccattatcttagtgatacacccattatcccatcattattttatatgagattgaaagtaattaatcacggatccacatgatgaaataaagtaacttgtgagtttaaatagggaatgaacttgtatatgattttacttttttccaaccttctgcaggtgtagctaaggcagcgtccctacacattggggtg

SEQ ID NO: 14741 - DNA, 932 bp, Setaria italica
  Intron number 3 from transcript Si005293m (locus Si005293m .g) derived from phytozome v7.0 (chr-ID scaffold_5; pos 44 897908 to 44898839 reverse strand)
caggtttggcttctcacgcattaaactcaaatatcattcgtgctgggtgtatgtttgttattgacaaattatgtttaatggttcatagtaataaatcgcattcatatgcttgtattcaatcggtggtgagcaaattcttcatattcctagggttctgatctgtgcattaagcatagcaaacttttggactttttgagaaagcatgatgtttgtgtccaacttaccaattattgtttcaattcaactgactttgatgaattataactgaaaatgcatgaaaggtacacgttaatctgtcaaaacccttagttctatcttgtcaaaagtacagctaaattctgaagcagaagcaagtagtttcctcgtgaaaataacttgcaggggttctgttactccctgataaatttggttattttgtaaaatctgatgcgcacacaagttggtttccatggaaacattttactgttaatttttcaaacttttctggtaaataaatattattttagtagatggctactgcagttataacaatccatgcagcatgtgcaatttgtttctttgttcgttatgtttcctgcaaaaagtttcttttcagatgaacctgtcgcaagtattagaggttctgagaacccacttagcacatactcttttacgtgtacagttattgcatgttaaaatcttttgctgacaggttccagctgaaagtgggttcttttactaactttgtccaaattctatgctaatcaaattagtctaactctgaagtcttcaaaaccccaagctgccacattagagcatctgaaatgagtgctacattacacattccataggttgggaataggtgtggttttaactggtgaatatatatctttccttgtgctcatcattctttgtttttttacatctcctttatgtgcttgtgtgtagggcct

SEQ ID NO: 14742 - DNA, 1094 bp, Setaria italica
  Intron number 5 from transcript Si022482m (locus Si021987m .g) derived from phytozome v7.0 (chr-ID scaffold_3; pos 21 158694 to 21159787)
caaagtaggtcgctgttctaaattttgtaaacttgtctccattaacatatttgatcgaattatttctctgatttcttcatcataccttgacatacgtatttctaaggtgccttttgtgctactccattttctttatgggaaaaaaaatcaattttacttccctggagacttttagttgtctggatagcccctcagaactatccacctgaacaattaaaaacagggtcactttactaccacctagcacatttatcctctttccgttccacacaggctgtgttacaagttgaaattttgtgcgatgatatatggaatcatgcctttgttacaaaatattttcatgactatcaatgtaagtttggagcagtgaaactgctttaaccctcaagatatgaaaatgtttgctaacagtaaaaaaacatggaactattttgtaacatattgcatgatgttatctaccatcagccaaactcaaaatacaacttttacaaggagaaagaaaaaagataaatgccagtaggggttgaagtgtccttgttttagcagttcagaggttatatggaccaaaacctcgagggagtaagaccttttctaaagtggggacatactgattctttattatgctaccttaatatgaagtgctggtcaaatatttagcgtttacttaatcttcttattgttgctacttgataccatatgcttggtattgttgcatgaataaaatgagatgttttgactatgttagatgttaaactaactactgcaacattctagcatggcatgcttatttctttatttttattgcatatcactctgactttaattctcaaatgaaactagtgtccaaatttaattcaggataactgattcagatgatgaaattggcacatcaaaacctcaaatctttcttttgtgcccgtgattgtattttcaaccttctggattttttcgcagtctgtttcagtgctttagggttggatattctgaagtttccctgggaaaatacgaagaaaaacgtttgatgttctaaattctgctcatttcatcagtgctacggtatgtgatctttgtagtctgcaggtctgggacagacg

SEQ ID NO: 14743 - DNA, 2435 bp, Setaria italica
  Intron number 2 from transcript Si015572m (locus Si015572m .g) derived from phytozome v7.0 (chr-ID scaffold_6; pos 25 348598 to 25351032)
gtgattttacagtaatgtgctatatgccatttcacctttgtattcagtcagcactagctaatgacagttatggtgtctaggtgaaacaaagttttttgcatgcataggatttttcattgactctattgataaatgttcgactattctgacttcagggagcttggttggagtcctgatggtggaaacaagattgttgatggcttaagggttggtgctcctaattatgcttcagttcttgttcgtgacactgttttaagtctcattgtatgttttgcagattgaggtgttacttccaaataaaaagcggtgaagggaaattggaacattatagtttacattacaatgttgctctagtcagtgttaagaattataatgttgattgtcttgcgaatctggaacatgattttcgaaacttttctattgaggtagtagctgcgggacgttgctttgaatcaggtgtattattggctgcaaatgggaaacacaccaacttgtcaggtgatttggattgtgaaaatctttgttactccacatgtaaaaccacaaaggtagtgatgctgattttctttataattgcctaattttacatgaatatgttgtaattaaccttatacaactgacaaattctctgtttaacctggttaggttgggattggaggaccccttgttgatgtcaatggaaaatttttgggcatgaactactatgatacaaaaatgggaacccattcctgtattgtgatgatgtctgcggaattctgaattattttaggacaaaagagtaagtgtggaattctcttttggtattattgtcctttatagcgctggtttgcgactgtaagatttgtttgaacatttcagtaatatagttgaaggaggtttcggtcaacataatattctattaaatctcatcttttgtgtgtttggcagaactaagtactttactttaactagacaggaggaacatattgttaagggatggcgagggaccaccaaacatgtacgttgacatatctcattactaataagccaccatcttctttataaattagctgatcatattttgttgtaggggaaaatcattgaatggcagctggatattacctgaaccaagtgatatgggtgaagaagaacttgaaaatgaatgggcagccctagaaaacagcatcaggttagtagtttctgttctactccggttaatatgatgtaagcttgttttagctggattacctgaattatctgtgatttaatatttgagcctatatgttgttatgtaagataaaagtgattctagctttttctttacgctacttgaaaacagtgtacaccatgcggatgggactaaaatatgcacactagaaggggatatggtgtctctttattatggagaatttgtataacatttactcagtctctcttgtttttgttttgattgcgctatctactcatgttgatccctattggattagtactcatattgatgttcgtctacagggatagaaaaagacacagaggtcaactttactcccatcctgaatgtgagtacacaaccactaaattttgatcactaaatgttatttaattatgctattcatcactatatgtaaggtcctcttatgatgcaaattaagcctttacatttgtacttctatacaattagtttaatattgtacaaaatgctaatcagtcaacattactaatgcaccgtagtttcctatgatcttaaataagtattgttttaaaaagtaacttcactctgatattaaaaagttgcatgcgcataatcgtctcatcaaccgagtccttcgtatacaaattaaatatgcagattggtaaaacaaaatgctacacgcacatctctacataaatctagatgcccaaaagatctctatacgcataccatgactttcactggctcctaagtgtagatctccatgggtaagaacaattacttgtaaaatgagttgctgcacaagttgccatcatattctaatcttagaatattatgtgcagagttagcatgtgtaagtgctaataaactttgttgcaccagcataagcagagtacaatttgggttgacactttaggttctgccaatccattaagtgaaatgtgattcaaccacaatgcttgtacacttgctgagttatcatacattaagccttttaaagctctgttatgccactaacaactatatacaatatcttattaccaggcagcatgaaagttaatacttttaaagagacttttggtgacacatatccttgtggtgtctgcggtgaattcaaaaaaggagttccttctaaaatatttgaaaatgttgtcgcacttgcttcgttcaatggtattttacagtaatgtgctatttcatatttgtattcggtcatcactagctaatgtcagttacggtgtccagcatgtgaatcaaagttttttga

SEQ ID NO: 14744 - DNA, 795 bp, Setaria italica
  Intron number 6 from transcript Si017237m (locus Si017237m .g) derived from phytozome v7.0 (chr-ID scaffold_1; pos 31 09049 to 3109843)
tagtgctggtactgggacaggcaagtgatgcattgacttgttcatgcaaagtgtttttccaacatgagcagtacttttcataaaatcatccttgtttcatttcgcattggctgacaaccgcactatcataatattcgatttgatgataatattaactgttcagtttgtagctaagtatagtgttactacgcatcctaggcaggcaaacattttgttgtagtactgtgctattatcaaggtatcatgttaattgttctaaaagaaaataaggtgtcctttatagtgtttgtgaaataatggagatcccatcgagtaacaaaacggtaaatgttttgcagcattaagacgtgatcgatctcaagttgaaacaaaacacagtctgctagcagtactccctggtagcatgctttctataaacagatcatccacactagtatgctccggttgcgcatatagtgcgcatactgaagttatgtgatttccagggacatttctgataattctagataagtcattcaaaagaatgttctgtatgtgccaactggcactcagaaagatttgaagaaatgtgcatacaggcacataacaccaaatgtgcagaatcgcatgtcagtagcaattgaaactattattacattgtgatttaatcttgtcaaatttagtgctctacggaactgtacctgttcgtcattttattttgaatgttgagtcatggataaatgaaattatcatatatgaagcagcttatcagaattatctgatctatctcatggctttcaggagaaactctggaag

SEQ ID NO: 14745 - DNA, 1528 bp, Setaria italica
  Intron number 4 from transcript Si010651m (locus Si010651m .g) derived from phytozome v7.0 (chr-ID scaffold_7; pos 17 689377 to 17690904 reverse strand)
aaggtatgtattcttacacacacacacacacacacacacacacacacacacacacacacacacacacacacacacatatatatatgacgcgttgatcttattctttgtattttatctgttatcaaggatggggctgtgagtgtcttagttcttgctgatagaatcatgtacatttttatttgtttgaacacaagcagaaggtagtcttagtgcttgttgatctttttttttctgcatacttattgaattacattttctttgtacctctgtattctgatcttacatttagctggctacacattctctcccttgcactaaacgatgcctgtgttatcgtttgtcagtaggcgtcagcccacttccatccctatttatcagtcaatcatgtattgggatgctccagtcacttactccataagttcccctccttttgtagttgtctacatttttaattgttgaaggttgttttattatggcattgttacacaacagattaaacaattgcctaacttggaccagaagatcagtcaccaaaaactgcatttatctgtgctggagactccagtgcaattttcttctcctaaaggaatataaggcaggctttgaagctataaacctaagtcttgaattgaccagatacagcattgatgtcttccaattttctgatcccacacaatcttccctaacaacaacctcactaaacttcccatggccaaaacatgttctagactaccagccttcaggtatatgctttactttcatgttaatgagaaaataaacatgagtggagaaccaacaatagctaggagagagggaggttgttaccgctcatctactcagaaattcttaatcttctaaaccatattactggtatttccacaaagatgtttttctaagtcgcactctattaaacataactgccatttttgaatgcttgcagttggattttttaaatgttggctatgaatatatcttgattgcacatgtggaagtggaatgagtagatgtgtctcgagaatatatccacaatatgtctagatcatgttgacatcctaagcaatcacctcttatttgtgcttggtgggacctcctaccttgatattagcattcctacctacagcagtcctgatggatctttagtagtttcgtctcactctcctgccccttttttttttgtaacattctctattaagggggccatcattactcatgtattcctcagtctccacacaatcgtttgtcattttagggcttttctgctttcctccactcacaaccttgtactgttcatctcatcacatataccacagaatgctcaacagtgttttcgcctagtgtttttcttttccttctttttcagcaaatatatgatatggctgtgagtgaaccttcttttttataaaaacaaaatctcatctactaaagttgagtaacctggcaattccaatacattagtcatttcatttatgtgccgaaaggtgcaagcactacttatttgttctcaatacaagcacctctggcatgcagg

SEQ ID NO: 14746 - DNA, 1513 bp, Setaria italica
  Intron number 1 from transcript Si035024m (locus Si035024m .g) derived from phytozome v7.0 (chr-ID scaffold_9; pos 56 989698 to 56991210 reverse strand)
aaaggtaacagataaattaaaccacgggaatcacgcatgtccatgacctgtagattaatttcagataactacctgtagttgcatttgacctaataatgtcttagtctttgatcagggcgtgctattaaaataataagcgtactaactgtgttctgagttgcgataagcatttgtctagagataagcatgtgctgataatacttgcataacttgcatgaaaacaaatcagagttaccaagttgaccagatgcatctttgtagatctcgatgctaattttgtgtatgttctacaaagtaacaatcatgtgctgacatgcatgatgtctataaaagtgaatgagatttgtttccttcttaagatactagagccattgcctgagctgttcatatgagcaatctagttgcattttgatgttctcaaatatgtcagtaaactgtgttagctgttctggactgtgatcgtgtttaattcacagtttgcctccccttgaagccttttgcacagtctcacaatcatgcgccgacatgcattatgtctattaaaagtgaattagatttgtttctttttttaagatactagagccattgcctgagtttcaatctagttgcattttgatgttctcaaatatgtcagtaaactgtggttgctgttctgcactttgatcgtgtattcgtgtttaattcacagtttgtctctcttttgcacagtcttgccttttttatttgtagttcaggaattagatccaaccattttagtagagtagaacataatatgcacaagccagaaagtaatggaattactggcttcagtatttagacaacaaagtccccatatattttacatgaatatctccataggcttattttgtcacgggccactaactttttactcaggtggaactcatccacaaatacacaaattgtgaaactgaattctgtaaacttggtcctgtttgaaatatatatggacgagggcagggtcccttgaactctaaaaaaatccacaaatacacagtcagtatatacagttagaatgagttgcagggaatgtccccctcaagtgtaccagtagcatatagtgctgccccctcaacaaatggttattgcctagtgcacagcaagattaaatgtttagacactcgggattgactttcatcctacaaacagaaagattagctgaaatattcagacactccggattgactgtcatcctacatgcgttgcaggatttcaattgttgtctctgttctgtcccgaacatgtgtaagaatgttcagaattacggatcatcaacactcattcttactttcggttgattcagtaacagaatatagtttctcttcaattttagaacactgtcaggggttgaggcctgggtgttacaggcagttatagacataagtagtggcctctggtaacatgaaatgtgcagtgcaagtcggcagattcattcgaacatgcaatgttgatcttcccagggtacttcaagaacccagaggcaacacagtcaacg

SEQ ID NO: 14747 - DNA, 1521 bp, Setaria italica
  Intron number 5 from transcript Si011699m (locus Si011699m .g) derived from phytozome v7.0 (chr-ID scaffold_7; pos 10 915022 to 10916542 reverse strand)
gctcccgtagctacccggtttttgtagaaaatgtaagtttgccatgtcgatgttctatcatatttattagatatgtacagttgtactctccctctctcttttgtacttctagcctatacagcttcctgttgtactatcagcctattggcatctatacatgaaaggtcacccccctcctctcagggtgtggtgtattgcctaaacattcaataatgttaactgcatatccattctgtcatgctgctctatcatattttagcaaatgatgttcttgctgcagtttattagtacttgttgtagatcattagttcttgctgcatattattagttcttggtagtaactgcatagatcagtttgtataactgcatattattagttcttgctgtagatcattagttcttgctacagattattttccataatgatatgcgtacattcttgcttgatgtggcaagaccattcacttattttactagaaactgggcttgtgaaacatcagtgtgtctaaacaagttcttgaaccattgactagtatataattgacttgattgctttgtggttatacaaaatggagtaaactagtcttacttgtctggtagcagcatctcttagtgtgctgctatgtagttctaggttggcacaaggaggtacatgtgacatcgactaattgcacttaacacataccctgcatctaatctccattaagaactgaccccatactgcttgccttgtgggcagaataatttccactgctgaaatccaataaattccattgctgcatatgcatagtattaactcttgtactaacctgtttgaggcacatgggcgtgtggccacatgggcggatgttgagacacggtgagttttcttgctgatttgatatggtgactgcatggtgaatctacatcaggattgttcatttggttaccttccgtgagttgtggaatttctactaattgtgttaagtttagttccgtagcagtaagctctcctgttctatttatatcattgcatgcaagctaccaaattatctctgctaatgatgttaaattcagttcagtagcagtaagtactgattttgaagaatagatggctatctcaactttggctattcatgttgatgctatgcttctgtactaccttttgttttgtgctcatatttgatataggtatattcctatgttcatcatggatttgagttgatgctggcagatgtcttgaacaactacatttgtttgccatatgcattattcatgttttacattgctgtagtgcattattcattatacacatcctgaagcacatacactaaatttttcagggagatgagtacgaggataaggaacctgatgcgttcgatttgttcaaagcgtgccacttcagcaagaaaaggaaaggctttatgccttctgtgcaatcggttattgtaagtctgctctctaatggtgccatatttatttggatattttaaactgccccatgatcctgaatcatgttagctgcttgcttgctagactgaa

SEQ ID NO: 14748 - DNA, 3972 bp, Setaria italica
  Intron number 10 from transcript Si035629m (locus Si035629 m.g) derived from phytozome v7.0 (chr-ID scaffold_9; pos 2 5275405 to 25279376)
gtgttattgactacaaagagtttcaggtaattccttatgtgattgtttgagactcatgttgaatcttcatgtagtactttctaatctagttatctaaaaaagaaaaccaaaagaaaaaaaaagaatgaaagagaagagttaagatggccaataataggtttgcaggcggggcgggttgtagacagctacatgcccattaagcttgtcgcaaactaattaagccggttagtggccatccgcagtcgcaaatatgcagctcgctatgatctagtggactttgtagcagatatagaaaacccacaaggcccacaaagtacacgtagctagctagcatgcagggcagcctgctcgccgctactatgtattcacttctctacttaatacaaacatctggtgtgtactactaatcaatgtctccgacatatcgcatagaaccatactccctccatcccagaatatagctacgtttagactttttcaaagtaaaatattttcaactttgactacgaatagtgaaataatcatagaaactaaaaacataaaaataatattagtacatttatcatgaaaccaactattataatatgtaaccttttctatttgaaataaattatttttagaggtattgttggtcaaagttaaaaagatttgacctttgaaaaagctaaacgtagctatattttgggtgggacggagggagtacaacaatagccaactttaggtgctgaaattttaacataatccataaaggcattaaaagaatagccacatcaatcaaacaattctggacagatttgcatagatgaacaagaacttgcagctattttcagtacatttcagcaggtattctttctgaataattgatagcaaataatcttgctcgtccaagcaccaacttccttgaattcttgaaatttcaaaaacaaaaaaaactcgcaaattagcctgaaaatatacatgttgttcagtaccaatgtaacacattcaatggctgtgattggtggaatcctgaagaaactaaagtacatgagggtactcatagaactgaacaatcacatagtgcaaaaagaagtgcatttgctgtgataggtggaatcctgaagaaactaaagtacattatgcaggcagcagttttctcctttagtgttagcaagtagcaataatcaccatttgaaggaagaaatttaaaagattgtatatagcaagattgttcatgatctgcatcaaagatcatgcatattcacactctttcctttggcaaaagcaaaagcattactggctttgattctcaaaagaagtaaatgactctgttcttacaaggaatattgtgagcacacttcatactgcaagaacctgagctgttcactatacacgatgcacactgtacaatattaattgctacccagaaacaacatcagatgtccctactgctgagcaggaaaagattgagtgaaaaatggaaacaaggcatgcactaacttgcacatatgaggacagttgattggaaaatttagttgtactgaatttttttctcagatttcttagcacttccagaacaagccatcagttttagtcaagtaaatgacagttcactacaagaagtaacttttagtcaaagattacaaggagttagtgcataacttttacttcttgaaagaaaaaaacaaaaacccactcatttattcttcttaatataatgatacgcagttctcgtgcgtgttcgaggaaaaaaacaaatgacaggagctccatagttatggttgcataacatgaatataaaatataaagtcagaaccatgcctcttaagttcagataaaacttatgataccttattctatggacagcttacattgaatttacaagttcaaagggagtcaatggctcttcattagatttacaagaagataatggagaaggaaagaaagcacagaatcaacaagacccggaactacaatttcagtactaggccaacagtactactctgaacaagaacaacagaattaacaagtcagatgatgcaattgtcagcttccatttatcactagaaaataaaaatatcataggattagccatcttttcccaaattttacaggaattctactttgtgtatctcttctatgtgctttgctgaacctaatcccaatcaccgaattcacatctatcatgacccaactttctcaaaatccatagcgaaatcaggatctatgccatcatgtacggacacaaaaggagcgaatgacatgacaccatcagtagtattgcggacacaatcacacaagattgagaaggggccacatttatctcaccctagcacgcatcggcgaagatgcagtcggccaatcgacctcgatgatggtggaaatgaaggcctttcccagctgcaaaggggtaagtagatgaagcagtcctcccacagtccactgcgtggggaggagatgtcgggtggccaggctggggacgttggctgcggcggcaactgccactaggtttccacgagactcgcaatgcatgttgtttgccgctaggtttccatgagacttgcgatgcatgttggtggaagagaagctgcgggttctttttgggtctttgtggttttatgctctcgtccgcgggctttgcagccaggccaacgttgggccaccaaaacttcgcagctgggccgcatccgccacatacgacgattttgtagggtgggtttgtgggctcatataagaacctgtcccgcctgcaatcctagccaataagatctaacaggaacaggtggaacatataagcatgtgtttggtttgaggatggagtggctctgtcccagttttttagttaggttgaacccatttcgtgctcgtgtttggttgagagggatgggttcattctagttttttttcttgttttgatggattaggatgtatatgatggatgacattttaacaccattagtcaccatcagccatggaacccatttgtcatcctctaacgtgcatcttcttcctcctctctttctgccgcagctgttcttcccagcagcaattagagaaccaatctctctgctccttgcctctcctcccatcttacaagaagctagcagctgcagactgcagttagctccacgcccatctaatttttctttgctcccatcaaaccaagcagcagctagccatcatctctctcccatcaatctattgcctcactgcaagcatcacgacaaacttacgctcttccccaaaataaaatccaagcaccagcacagctgtgccgcccgctgcagcctgggttcctgctgctgtacgatggcacctcacgtatgtgcatgggctgctgacgtcgcttgcagcggcgcttgtgcagctctgcctgcgtcccccagtctatctccgctgcaccgtgcccactcctgttcctccccttgcctcctgccctccttgtgctgcttgcaaggaactttgcctgctctcgctttcgctcgcctgcaggctcgcatgctgcacgcgtgaaacagaggatgggaggagcggcggcatccatctggatcgagttggtccgaagtacggagccactccaacccacatgaactcccaaccaagtacaagttcaacctggttgaacttgtaccaacccacttcaacccaccattcaaacacatactaatagaacacatgcataggataatatagtggcaatattataataggatgtgaatcaaaatctgaagtttcacaaccgtcagatgttgatggcatctcatctaacaagcccacaaccatttgcatcctctacaactacaagcattgcttacttcactttgtaatgaatgagggagtttttcttaataacttaattctaggtacatactgctctttatcagagctatcatagagaagtacggatctagaatatatggataacaaagtatctaacagtgtttcttaaattctaaagcagtgcatctggagcccaaactgctgcagtcaaga

SEQ ID NO: 14749 - DNA, 1439 bp, Setaria italica
  Intron number 1 from transcript Si016993m (locus Si016993m .g) derived from phytozome v7.0 (chr-ID scaffold_1; pos 40 082138 to 40083576 reverse strand)
aggtgcggctgcacgagctcatcaccgaggagcaggtgggtgacggcatcgcgattcgctctccacgctcgtgcaactctgcttcccaaaattttgtcgccagtttgctttcgtatgggggtgttgctttgtcggtcgctctggtttgattatgcagcttgcaagtgattgcttacgagctttacgttggatttagcagcgaaatttggaccccgtagacatatttagcggaatctgcttcgctgggtaacgttcgtcgttcggttttactgtcgaggagagaatgaacgccctgcgtcatgcgatctgcgtgacgttaccggtggctcgctcactgcagactaaattttgatgttacatagtacagaatcgactaactttttgcggattaccgattgactccgaaggcagaaacgtgaagcggggtcggtaggcataatatcggcgcgtgttttttggacgtctcgagggaaaatgttgttctccgctgaaagttagctgtggagacagaacattatatgcgtaataaatgcttgcaccgctgggtgttgggaacgctctagcgaatctgtgtctcgcttaggcccagtttcatcacactgttactgcaaactaggtaactgttcatgttgggtttcatggggatgaaacttctctctcatttcatgaaacttcatcctctctctcctcataaagatcttgccaagtcaacaaaattgctgatgtggcatgcaaattaacgctgatgaaactctctatgaaactcccactgagactagccttaatcacttcttcatatcggagttgacggacatattcaatttggttggtagcagttaggggagggatggggtatctaaaatagagatcatgtatcatcatttccgagttttcttctttttggaaaagaaaatgaaatgaaatcctttcaaagtgaccggtgtgggactgcttttcattttttttaccttgacatttccctgtgacaaaaccttaaccattagtcgatactgatttcagcactgcttgaggagtttcttatgcatcaaatgttgtcaactatgtcaagtcttatgcatcaaatgttgtggaacttgacattaacttgttgggttgctgacgtaactatgcactataagagggctagaactggtgaaaaacttagggtagaaaatgtatataagtctacggaattggatattcttgtgcacacacctgagatgttggacaacttatgtaacatgttagtgtggttgcgaagataagctgaattcaagactttactccaaaattgtttgtagctatcaattgtgtgatcatgttatgcactcacaacacattcttttaagattttttcttttccatttgtgagaagacaatctactgacacaacatttttttcaggtcttcgatctttctgttgtgaagccttcagattt

SEQ ID NO: 14750 - DNA, 2457 bp, Setaria italica
  Intron number 1 from transcript Si001620m (locus Si001620m .g) derived from phytozome v7.0 (chr-ID scaffold_5; pos 18 482299 to 18484755 reverse strand)
tcttccttgtccccgtcaagatctctgatcaccaggtatgcttctttactcacttgtactatgtattctgtagtttgaaatttaagcgcaataagaatggatgattggatacatatagtttgatatataggaatcgagtataattaggcagtgctgcatcgaatctctttaggatatctgaatggatctatagattattttgatccaatgttgttcaattaatagcaatactgaacttctgaagtgaaccaagtgaatattcacatattggccataagatttaaatctggtcatgtagttacttgttagtgaacatagttgattttgcaataaatatttcagttcaagggaaaaattaggacttttttgttgaccagaaggcttgatgcttcagttgcagctggctagttcatgggcttttgttttcattaaaattgtgagttcattatgcattataaaaggcaccacagttgagttgaaaaatttaacattttaggtgcaaaaaggatatatgtgtttgtgctagggagtagttgagcaataacaccacgcctcagttggggatttgaattacaagaggatcacaattattatcctttcttaaaagagtaaactgacacactatatttttgaccttaaccataggaaccccttcggtaacttgacacactatacatttgacttacaactgtaggattgcccccttctgtaacttcacacactattcttagaagaaagcatcacatctttatgtgatagtgacacaacctactctgcagtccacagtagttaaagccttaaaggtattgctttgttgtgattatattgtggatgagtctttgaatcacatctagatagggatgtatggacctaatctgcattattgacatgaatatgtgcttgaagtgggtatgatccacaaattggggttggttaggttacggatatttatagtttaagtataccatattgttctttttaaccaaaatgagctctggcatttttcttaataagatgagaacatatgctggccccagcacctaagtgtaaaaaacctttgccctgtaaggaacattcactttacggagagtggtctgctatactgcatagaagttatatggtacataattttggaatctaatagaatcataagaatctatgatttacttgaatttggtgtgctttaattaaagaatattggctatgtgctggggtggaaggtccgggaatgtatccgttaactgtcatgagataattgttttgggcatgtacttgttcagtacattgttaagattgtggttttgccagaatatttgaaacggacttgcagagaaaaggaagttgacatttatgactatatatgtacctttgcttttccccaaatattctatggatctacctttaaaagaattattggaatctttatcttatgggatttcacatctagggctctagaattgctttcccacaaatattctatggatctacctttaaaaatcttcatcgtaggggatctaaggccctgacattccaactttttatccaatgcatgattctccactttcggtgcaaagaaatggaacatgtcatcgataggttgcaattatgacttagatgcgatcttcacctgctcatttgtatattttcattttctcagattctttctagaataatctcggagtatatgctttttttcctacttggaatcaaacatgacaaattatattgaactttgggttaggaagatcatattaaacctggtaactacccataaactgtggataactggtatgattttctttctttttacttgataacaaaactaaagccttgaacgattatactggcgttgcaatcaagctggaaacataatttcctgattgctgtatattccaatcaagcacctgctcataatcagttattggacataacagttctcacatatatggcatggtaagctacaacaatatgttaagtgaatcacatatatttagatgtaaaaattatgttagattgcatacttgtttctttccaagggatgcttatggcttttaaatcaagcagaagttgttaattggtccttgttcctgttgtgctacagatgcatggtagttcctgtgagttctgttgatttgatttgaggtttttatttgggagtgattcttgattatggtttttataaactcttgttcaataattaagatttccataatatgattgatgatgccctaaatctagtaaaaatcatctggcttcggtggatatattttttttttactgttgtatgttgggggtggtcacatttcataatttgacgcagggcatggaggaaataattcactgtacctttcgtggtagctgattgcaaatttccgttttacatatttcgatgtactaaccttagttcacttggtgtatgcagggtccactctcagtaggctttccgatagagaatcg

SEQ ID NO: 14751 - DNA, 588 bp, Setaria italica
  Intron number 5 from transcript Si001649m (locus Si001649m .g) derived from phytozome v7.0 (chr-ID scaffold_5; pos 30 363439 to 30364026 reverse strand)
ttgtatttgtaagcattctcttgaagcaccttatggctttgactgtattgcaatgattaactgagcatcttgtttaactaatagcatatgatttgtagtttatacttttgaatcccgatttctttcccattcatgttgttcttcctaaagtggtagcaaaaatatgtattactgcctacagtgtatcttaaactaccactttcaagtcaattcatattgctgctgttcaaatagcaccctttgtttgctcacagtactgtaaatttgacattgtctttgtatctcctttgatgccatgttcagttatttggtgctattctagaaaggcgttgacctgtatatggttacatctcctcttattagttgcccttgtccttatcaacagtatttacttctgttccttgttcagttgttaggcttctatgttgttcagttatgtattcatcatttggacatctttttttatctttacctgctgcagttaactactaacaacatctcattgtgtagcctacatgattttgaaattctttttattttttgctgatttgatggtacactttcatttgcatctaatttgttcagggc

SEQ ID NO: 14752 - DNA, 2972 bp, Setaria italica
  Intron number 16 from transcript Si009198m (locus Si009198 m.g) derived from phytozome v7.0 (chr-ID scaffold_7; pos 7 541492 to 7544463 reverse strand)
acaaacacaattactgctggtaacttatttgggaggtatgccccactgctaaccaaatactttttcttttatcactttatattgatgttgtataagtacatgcatacgtggaaaggttgttgactcggattggttagggtcactcattcttaactactctatttgacccatgtttacacctgtggccattaatatctggtgactatttgggatggctttgctatattgtactaaattcctattatttacctttacactgtattggttacattcaattaatgataattacgaattaaatgtgtttcaagctagaccaattagttttttttgccttgtaaatatcatgtgaatttttggcagtctgaagtggcaacaaaagataaaagtagcacatgttatgaataatagaggctggatggtggcccaaacgacactatatatagagtacatgaaagacacatgagccctcaactagaatattacactattcaccttgactattgtacccccccccccccccccccccccaaaaaaaaaaatgcaacgtgagtgcaatggaaccatagcattcgaagttcgaaatcaaaggtgaagcgttgaacatgtcaatgtagaaaacaatctcctacacaagagggtattgctgtcacaacttgtttttcggcaaatatctctagtcttcacaaaccggcacttcgactcttcaaacatgaattttgctttggagactttgaacgcaatgatagtgagatgtgtcaaatcaagccaaattgagaatagagatcgcttctgcaagacggcaagcagaaagatgacgaggataaataattggtcattgatcatgatgtgtaggctctagcaagatggatacgaaagggacaaagaggtcattgtcacgccaacaatgatgatgattagctaaatcaatgggactcagctagtcataagacaaaaggaagaaatggctgactgacaatgaatttgtggacacgcacgactttgacaaactacaagagtgcaattggacttggattgacactgatgcaactaatgtgatggaatttaggaaataggtcttaacacactgcagacgacgcaaaacagagcatgcaactgaatatggtatcagggtcagaggtctcgagttcgaatcctcgcaagttcgattgaataaaataattgcagccaattccaatttccacatatgcgaccaagggagcctgcatgtgagggggagtgttgaattataagtgaatttcccacctctccccatcagcttaaggttttgggttgaattggtgcatgcaactcaatagaatctagtaatatcaatattacatccatcaatctatatgatttgtagatttaatggtcaaaattagaaataggacttaggcaaatctaaatgaacttatatttgggattggaggtggtagttactaaagaacatttcctacaatgttaatagtggatctcacattttttaaatcttgtcctcttatatttttttacaactttttgttgggagagtatggaagctccttgccaatattaaagtgctctgttactttttcagatgttggagcatctagttatatcaattaatagtaggataaagcttcctggcccttttttgattggctgtttttgaatgtgttctttactttaagttagacggtacccttgcacaaaggctattttctattctatatgtagttctagtgtgtgtacattgcctgggaacactatataacagtgaatgtttaaagaagagtgacgggggaagagatattcagagccttcattactcttgctagattatgaaggttttgtacataagttgacgaatcatgaagccaactagagttatggactttgatgttttttttaaatgcaactcttgttatcattgtttaccttaagtgctactagtacttttcacatgtcattgctggctttagtatctttttagagttatgaatcaaaatgcttagggatgaaacagtgacagaattccgttggaaaggtgaaacgaaaaaggatatcattcgaaaacgatacgggaacaggaaaagttttggaaaacgaaacggaaacaggacgacgtttgtactgtcgaatcgtcggtatatcgtttttactcagaaattttccatcgaaaaattccgaacaacgtaccccaccttgttctttcgacgctcggcaatgacttgagctctctggtgcgaaaatcagcatgcttcacgccggacgtgatggcgcgcgcatctatgccgctgcgcttgatccgtgctgcgccgctcgtccgtgcgagccgcaccagccctaacaccaccctcatccatctggccctgctgccgctttatcgctcgatcatgggggagtgaaagaaacggagacgagggatgggagagagagatgatagagatgagagattagagagatgacaatagccacgggagccagagataatattggagccttagagggcaatttggtctttcacctgcttttaatttttcccctctattttgaggtttcctctaatatatgagacatacaccataaattacaccacaaacatgataaagtacatattatgccttttctcaaacaagcaataatataacatacaactttcgattttgaggttgaaatgttctctttatgtgtattcatgcacacaacttttgatttcaattatcgatttcgaccctatagtttcatttccaatttaccagtttttttgttatcgctatcatttccggacttattgtttccgatttagtttccaagtaaaagaatatgattaggaaatgataatgagaacttttgatcgtttccaactgttttcatccctaaaaatgctccattactaaatggtgaatggtcagcagtcagcaccattagaactttttctttatcatcctaatattatttaattttttgcagacgacgtgtcatacaggtat

SEQ ID NO: 14753 - DNA, 1088 bp, Setaria italica
  Intron number 1 from transcript Si001913m (locus Si001913m .g) derived from phytozome v7.0 (chr-ID scaffold_5; pos 14 006300 to 14007387)
tcatccggctccatttccacgactgcttcgtcagggtatgcatgcctcttccccatggatatgctgtcctgtttcttctctgctcgtttggcttgaccttttctctctcgtttttacaaaattacagtaaccggtagtacgttatcaattggctctagctagttctggacaaattcgataaacagaccctactgtttatgcatccattcatccattgatccattctatggtaagtccagcgagtgacattagctaaggaattagccagcaattgcacagtaaaaattcaagtatttggccattcttttctattgaatatatatggacggaataaagggttcagacagttgacacagtcgcatatgctttgcttcctccctggtaactggttcttcaccttttggtttgtttaatttggtcggtattcccttcttttggagatgtggacaacactggacaggcttgtgttttgtaactagtaactactataatacaattcaaagtcctaagtaaccaggagaaaatgatcgccgatgcatgccatggaagtcatggtactctagcttgctttcagcccatcactttcctccccccatcctatgggtatagctagctggaaagctcaaagtatagtaaaccgaaagaacctcgtgtatgaattattgtcaaacaaagtaacgaacgaacagtcgagatcggcatactcctaccatggaaaaagtaaagtcaaaggagctagctccacctccctgtccctctacttgctagctcccgatcgaacagctagctttttcaggccacagatggtgcggatgagcactgcgccacgtgcatcttcgtgcttgtggtcgccactcgccagcactgtatgctggaacaatcagaaaaagttattctagttgagaaaacacgtacaaaggacagtaaaagattccgtaaattttggttacacaagagttaccacaaatgatatgatcatcaagcaacttaattctgcgacgaattgttactctacttgttcttgattttgcaatcccgatcttcgtcgtgcagggctgcgacgcgtcggtgctgctgacctccccgaa

SEQ ID NO: 14754 - DNA, 2903 bp, Setaria italica
  Intron number 1 from transcript Si040009m (locus Si040009m .g) derived from phytozome v7.0 (chr-ID scaffold_9; pos 49 075490 to 49078392 reverse strand)
aaggggcgccaggtcacgcgctgcgtcctcagcctgtgagttcgcttgccaagttctctttctatcctccctgcttgcgctccgtccgatcccactcctgcccgattacgattggaatccgggctcgtaaaatgttgcttccatcgtgctgttcgttacggttcaatttgttagcgaaggtgcgctcgatgcggttaatttttgtgcccgattttgttagtttgtagtgagcgagaggctctgggtttgtgatgtttattagtgggcgctatcagatacaagttggtgattgtcaggcttatcaataaggctgtactgagctggggatgtatcagtagctgcatttcccagttattcactgtcagattatgcacagtatatcagtgatgttgcaggtgaacagctaattggcaatgggtatgtggtagctgagtgtgtgctcttggttatcagggtacccagcagttgagtgatcatgcaatcttctgctgaggttgtgataaccagtagtatttcctgagaaacatgtgaagaaacttcgcatcttaagcaaatatgctatgcagagctatgagacttttttgtagcagccaatggatatagaaaattatgaattatgatcgcatgatacaatgctagagtcatggttgtgcgattacattggtggggataaattggtgaggtggcatagattaggcagtgcactattaaaccggtgattttgcaattgttagatagctcattttggctttagagtcatccatataaaatgaacaaatggttccatacctttatttcttggttagttttttttttcaaacaagaatcctcctttgcaaccaataaattactgtgatctccttagttgataggaaatcttcactcgcatgatacctgtttaagtatttagttttaactttatctgcatttttgttggttctgatttgtatcatttatgtgtatcggattgttctgggatagggtgataggtattgattctgctatgctcattttcttcaacaaaattgcatgaaccatatggtctgtgtcctttttcctttcatttagtgaccatcaacttattaattctaatcgtatggatcctagggacaaaacagtgattcgtgaagccccaaacatagccaagattgataaagctgcctctaacataactaatagagaatgtaagtgatggtacaatgcttaagttcatacatagtcttcacaactgaaatacagatacttgctatctgtcatagcctcataggttatcttgcagtggttagttcagtgttaccccaaactggaaatgtgggtagcgagaacctactgctgcaagttgtgtcacaacacgttctcttctactagtaggctgggaactaccctactttgtaaatcttccatttaactgctttgtattttgctcttgagtaagctgactaaaagtaaccagttagtgccataacattttctgtttgcagctaagaccacatttctccccatttgctgatgtgggttgcatgtgttaaagtttgatccaccctctagtcttatgcaattagaatgttctgttgaggccagaggatcatcatgcgtgtgtggcatatccataaattgatcaactgaatttactcgtcatatcctcaaagtagtggtgaaaaaaatacatgtaatgccagcaagtgattcagggaagcaaaggagtaacgaaatttacttgattatgacattgcgtttaaggagtggagatgctggtaacactacttcaacactagtgctaacatgcatggtcgcatctcccaagatgttaggacatgttcttcacaagtatccagtagtaaaactataacacgatgtgcaatggaggaattgttggtttttgcccaactttataccttttttctctacactgtgttggcggtgaaaacaaatgagttaagtatccagtagagtttcattcagccttgtcacacatgattttaaaataaaaagaattagtgacgtcaacctggtttgaaatttactcgttatgtttattttacctgtcaaaatgagtccattatagtttggcaaatttgtcgagtagaagaatgaagttgttgaattggtgatgccatacttccattccacgtgccttttttttaggggcttcttgagcattgtggtcagggagttaattatatagtttacataggacagagttagaacaggaaagtacattgtctgtgttgacattgtggcttgtattatttgagatctaccatatcctgggggcatatggcattctttgaagcttgaaaagattcatgatatgcactgaataagtacatgcctacaatatgacaactgacacccattgaggctgaccaatgggtcctggattcacatgtcagtatgtgcttttgctaattcttatttagtaattggtagcatataagcctgtctttttacccaagaagccacccaggaagtttttttgtttaatctgggaggtggttaggatttaggagaggaagatccattcagcggtagtgcatcctttttccccccttgcgattccgaaatcggaggttatgttcctttttgctcctattttgtgcttctcatatgaatgcagaccggtgtccaatgttttagctgtctttttttagtggagttacttgtatgatcctatgcttcattatcagccctgtttatttgaacaatgtggtttccattaagcttataactctttgttaagtagcatttgtccctaggttgtagcaccctgcatttcttgtttaacatggttttcttgagcaatttctattaagcttatcactttggtacttcttgtaccgttttgactgaccgtgttttcattcacaggttgaaagaacttcaccagaagtgtcccaaggaga

SEQ ID NO: 14755 - DNA, 1159 bp, Setaria italica
  Intron number 1 from transcript Si001299m (locus Si001299m .g) derived from phytozome v7.0 (chr-ID scaffold_5; pos 61 52454 to 6153612 reverse strand)
cgactccagcaggggacctttcggccagcacaaaggttggatcttttcctctttcggcgcctcctctttcccgatcggtgcatgagcttatcttctcgcttttccggcctgatgccctcgcctttgctatcccgtgttttccggccgttttgatgctttcttgatccattccgattgactcacagatatttttgggttccaagcggattgcaatggcagagggagaaatttgtagtgttgctcagcaaaattttgtagtgttgctcagcaaaagactaggtctttatgccatcctgttgatcatggttcaatcgttcttcttccctcttggcgtctctgcgttatctgcaattagaaaacactaatagcagcgttgaaggtttggtgctgtgaggattgggttggatttgtatggttcgtgattttccttttttggagttatttttgggccccatctccgtatagggtgcatgggaactgcgagctttggtcttttggagggtatagtcattgtaaagttgcaaactctgattctaactgttatgattttgacatcctaaaaggcagaattttttcggttctcgggggagaaagttgtaactcctttaattttctcctacacgggttccaaggctgaaatttccagaatgttatgcggccttttcttggtcgagaatcatttcttacgtgtgtctggaatcgcttctttcgtgatcacttgggtgcattaaattctgaaatatctgggcctcaacttgccgtttgctacttcagccgttggaatatctaatgttcttagaatatattctccatagattccaattcaggttatactttctagtgatttgatactgttgtgtgacgctctgattggctaattgatctgcgcacatggaattgaatttacatgaatgagcacacgagcagcatggccaactagaagataaattggtgaaagttaggtgcattaattcaggatttaattccgttgactttgttgaccatattgcagtcacgcatgtttttcagcgatctttcttggcagcagacacgtatttctagcgtgaattctggttagtagtgttgttctgtaatcttactttgatctatctgtctcattgtagtggattttacttttcaaaggaagggcaaaagagca

SEQ ID NO: 14756 - DNA, 2603 bp, Setaria italica
  Intron number 3 from transcript Si026155m (locus Si026155m .g) derived from phytozome v7.0 (chr-ID scaffold_8; pos 33 51515 to 3354117 reverse strand)
gaagataaagacaccatcattgatcagcttagcaggtttctttctgactcatgaaaatatttatagtttatgacattatgccatgatatcttcgttgagaggactcacctacccatctgtcacaatttcaatccttttgtctgctgtttcttgtggtttatgtttgatcccccttacatgtgtatcctcatgaatgcatgtggtttctctgtgtaaacagatgttctagctgtctgataaagattgaatgctcctttattttgttttagtagtaataacactatttttactttgggaatgccgtgtcaatggttattatgctcacaaggtggccactgcccactgatatacatatcttaggcaattttttcatgaaccatctcatctttcagaaggcctttggagcaacaatgttagcacaagtctttgtatttaaactgcatgttctagaatttcacacaattctttaggggaactttacacctagcagatatagagcaatggcattttttgtgtattggttttgtttgaggataataaatgtcaaagggatccatatgggagagaagtatcttaattagttcaggtggcctgattgaccttccatagccttttacctagatgatacagtaatttcagattttcagtgctcattcagatctaacttttttttttataagggattcagatctaacttgctcttgcctttgtagtcaatcaagttgttgatttgttcatttctataggtattttcttttttaaaaaggcactattgttttttttaaactagttgagctcgggtagctatggaggtgcatctatatatgttatgagtcggaatagttttgttcattgtactagttgataatacattagaggacttgtaactatttctgattacattttgatgtgcatttcatttttcagtcgttctttttttgagtgatctgctttcgataacctcttgttctctctgttatcaagatatgtttgttggttgcctgcaattttatagtcagacatgtctatattgatatacatctggaggataaacaaagaatgttattgtttagttcttcaaatgaaaccacctatttgagacataatggcatcttttctctcctggttctgttacttgctttgatgcctaattttctgtgcttgctcaatgctcagttatgtctctgttctctgatgggccacactatatgtcacatctgttttttttttgttgatacttatgatttagattaagcatgaccttgcaaacatagtagaagcatggaatgtaccatatcttttaatgtgctgagaaacatatttctaaagccatggagatgcttgggtggtgtatgagcaactttacattggaggagccaaactaccttcacattcgagagggcatgtggtagacaaaaccatttgttagtagctttggtatagtttctgggaaaaaccaatgtacttttggatgtccttagtttggttctaaacacaaaagtggatatgggtcagacatcatcaggtcaggggtaaaacaagccttaaccctgtcctagactaggttcagtattctactgatctctggatcggcttgttttggatagggcttttctttgcttaaattttgtgtggtttatataccagttgtaccagtgggttgtgacattgagttgaacgagtacagttttaggaagaaattggtgggtgttcactagaatctaccatccaactatgcttgagggtgttgcctagcatctagggtacttaggctggccaagtgggtgttggttgccttcaagaacagtgattgatagagcaaggaatatgggaattagtggataaagcaaatatcagttggccaaaaggtcttctactgcttatataccatgtgttatttatacaaagtacaaactacagacgcagtcgtggtacccctgttattgttgaactacatactgattactgaagtcttagtcctcctgtattatttgcatgctccggacagtcttattacctctgttatttacaaactgcacatgaaaaatcttagtatccctgtgttattttcaaactatagactacagtcttagttctcctaaatcaatatatggaaacataccggttaaaaaaatcttctagtattaagtcttagagcttattctgtgcaagataaacatcctctatagtttgctgctacatccctttgtggaagatgctttgttaagcaagagttgttgaacgtaaaacttaattctactttcacaggttaaacgaatcgcatgggcttacgttcaaaattgtggagataatttgagaacctcatattaacctaatactgttaaatacatattactagtaagtttgttccctagtaaagataaatatcgggactgtgcaggacttaccgattatgttcttcaatgaggttacagtgggatcagtctcaaacaatttttaatagttttgttacctgttctagacatatatttttttagatgttcttgtatttgcatttgcttcttgatttcaatatttcatcacgtaagctaatgtaggtcttcatctattttccagaattgatctctctgacagggagaacc

SEQ ID NO: 14757 - DNA, 1850 bp, Setaria italica
  Intron number 2 from transcript Si009250m (locus Si009250m .g) derived from phytozome v7.0 (chr-ID scaffold_7; pos 30 45652 to 3047501)
gcgctgcaatctttgcaccttgctcagtaatatcctgaacttcagcttgagtaccagtttgtgtgttatgatttatgaaatggctgaaaaggaccatactggtacacaaaagacaattcatgtctgattactttgatttcaaccagccatcatatcattccccaaaaaggtgtaactgtatatgccattttgtggtatgtataagaagattatttcactactttgaaatttgaatgacacagtttggattaataaactactaaggaccttggatgcataaactactaaggaccttggacgcataaactactacggacatttcctcaacttcccttctatgttgtcctactctgaacaagcactataatttgtaatgtagggaaaaacacctagtaagggggaaaaatcatgatgtagaactgtttactcaaaaactgtactgtaggattagaaggtgaaacattctggccatgctatggaggatgtgccttgttctatttagcagcatcccacagccagagaagcaagccctttttttttttaatcctgaaacacgtggcaaggaattcatatatattttttgaaaatgtttaatttgtaatcaacttttcttttgctgttattcagatggtaacggctgctgttcctattaaaacattctgtggaaaaagttccagttccagtgagaaagaaaagcaaaaaccatttaggatttctagtaaaattaagcttggtttgtttccagttgatgtatagtttcttgagattcagatcaggaattcctatggcatagaaagtccctaggatctaatctgtttgaacttatttatttcatcagaaaacttatctattgctgcagtcttgagagatgagaagggtcatctatcttagaacatcatgccactgacacagttctggtagtattttgtttcaagcctgttaaatatgatagttggggtgattatcttgcagcatattcttttcctattatcaattgtaatgagacaataggcacattcactcctgtaaccttgatggctgggacaatagtttgctgctactagagatgacaggtagtaggatttcaaagaaatgcttgactctttgtgtgttaatgctagtcattatgagttttctggattcagtgttggagttttgggactaagtacagcaggggctagacacaaaatccaatgaattctgcagaaattaactggttgttttcaagacaattcaaataactaaccgtatacctaagggggaaaaaatgcaaatcatactttaacctcgccgttgatcttcagattgcaccctgaactatcaaaccaagtatttttcatcctaaactttacaatgtcattcaaataacgggagagcatggcctatggtggccacaggaagctccaaactgggctagcctgcctttctataggattcctttatcccagctatgcttatcatcgttggctagcatcattgactttcacattatgctcatcctagcttgacgtgccttccacagtgatggtcatgtattttaggatgtattttgaaaccaaaggagttagatcaagcatgctatagttgtggtatcgcttctatgcaagatgtattttttttgttgttgtatccttcatgattgtacaagaaaagaaaaggattgtatatcagttagtcatcaggcttaactatcatgcatagaaatagcgctggaagacaaaagactcttctgtcatacaatctttattctggtgctatataattccccagcaatgttgtcacacgaactgctttatgaaaaatcgggctttcttttcctgcagttcctggagagtacttttgtgctcttg

SEQ ID NO: 14758 - DNA, 3918 bp, Setaria italica
  Intron number 2 from transcript Si024291m (locus Si024291m .g) derived from phytozome v7.0 (chr-ID scaffold_3; pos 25 357329 to 25361246)
tcctttcttcaaatttcaccgtcctcgcaggttagtgccatagtggcaatgtttcattccctttagttgcttgcaacatggcattatgctaacaaaaacaatgttgaacttcaaatatttagtatcataggcaatggttctaaatatgccgtggaagtccgctcttgatctgttatcattaaaagtgaatggtactatacatctacctcgaaaggagctctaaaataactcatgatgctaatttcgaaatgttactaatgtattatgagcatgtcttattctggtttctagacttcgatctgcctcagtgcccatctaatccccactctttaccttggcctgaagtctgccaagcaaagaaaaccaaacctgaagttagagataagatcttttgaaaagaattgggttgtctagtagggcaggattgtaatggcaagctcctctaggatgataattatcaataaatgttggaaaaggaataaaaagatatattcttttcttgcatatatccgcctctctcaactgcatataccttgggaggccctagttgcatgccatcgtgaccctgatcattattaccacaatcattgagtccgatcactactgaggccctcatccagtcatctggtctgccatcaactagaactattacatccactcggatataaccttaataacactaactgtaatggtgacattttcaaatctagagctattttactgcagggttttgtggatctaaatgatttgccctctattcctctgctttacccgtggtgtcacttacaatgcatatctgagactagagggacctacctccaagtgttataaatattccacttatgttttggaaaatccgcatgactcctgaaccatgtaaccaaccacgatcagacagataaatttggtgaatctaaaatatatattagtctctagcacacatgtatgactcctgaattatgtcaccaactatgaccaattgtgtatatgagattaattccagtctgatcatgcgggttaacagcctgcagagctgatcctgcaaaacaaacgtagctctgccgtcgtgctatacccgggtcaaatatgtatgtacataaaagatattccagtaaagtgctttcaattaattcctctacgtaggatctaggataccaactaaagggaagtgaataggcggtttcaactaaaaatacaacactaaataaagctaggtgagggtttgtaacctagggtgacaaaatacaattcaatctctaagaatacaatcgctcaaagtaaattgcagtagtgaaattgagcaaaagaaaaaaccgaagacaagagaagaatttatcccatggtgtcgctgacttggtggtcacccctaatccacgttgaggtggattcaatgttccaaccacttctctatcaagactccgcttgatcttgagccatcttggatcaaataacctcgattccactagagttgctcttcaccgatccggcgagatgagcacaagaacctctcgcaagaataactgggactccttcacaatcttcttgaagggtttaacagttccacagcctccaagctgtctaggaggcgacaacctccaagagtaacaagttgacgatgcttgcttgaagactccctagtactacaaagctcaaactcttgatacaatacactagaatcctctcaatctcacaagaatgcaacctctaagcaaagagagtgagagagaggagaagaatggttcaagtatgtgaagaaagctttccaaaatgccaagagacctcacccaaggctagacgtgaggtatatatagagccatcccctaatctagccgttacattcaaaatgcatgaaaataggggtttggcggaccgtccgttgacgagatcggactgtccgccattcaactcaatagctatattgacaataaatgtgtgttagaactatccattacatgtcaggtgaaccattcggccttaactccttacaggcgcgaaccgtccacggttcaagagtccaaccacgcagccagctattagacacgtccagaacatgtccaactgcaagaattactacggcggaccgttcgccttaggggaccggaccatccgccgatcattttgcccacgcacaagttaggtgacaaaccgtggaccgtccgctgttcacgttcaagcaccacacagaaccaacaatggttctatcgaaatttacgacaatcccttagggctggaccatcctccgttcacactcaagcaccacacagaaccaagaatggttctgtgtaaattgtagaacaagcaacggaccctccgcccttcaacttttcagtacaatagaacactctcaaacatggttaaatcaaataacggagaccatctgggcgttaaccattttataaaaaactgattttatcattgttctttccactttttcaaacgatatactatcacatatgcatacaactcaattgtttgaataaagtagcactatagaaccgttaagaaaatgaaattaacccctcttgatagtactgctatctagtctacaaatcgggtcaattatcatccactaagcacttcttgaccggtaaaatagaaaagccctacaatatttacctttgccttgagctcttcaatgttaattcatccaagctatcaccatagcatccattgaagcttaattcatctacggaactaacctatactcatatctcattaattaccaaacctaaattaggggcctagatgcttccactctactatattccagcacaatagttctcggcacctcgagtaccactttctcgagttggattccacatcaattattctctttcgtatctgaataattccacattgagttgaacaatgaccataatatataaacaaagttgaaaagccacataaaacccaacatttacgaagactaacacatcatcgagcactccaaatcggtacatttaagttctaggacaaatgttatttaaagttgaaatttaagagcaagtattgatacgtgtgatgttttatatctctaattaaatatagacaataaaatggaaaatgatcaatgggcaaaaatataataaataatggagcatattataacactttaagtaaagggctgaaatattgtatatctcagcccccatataggatatatacatgtagcaattcagtttggtttctcgttaatttaccaaaattatctagtgtaacaattaagcactctgacatcatatggatgtacaactcaatttaacattcttctttaagaaaaatgacacatgcacaacctatgatctatccttcgtattctcagtttgttaattctagaatattgcaataaggataaattaaaccctgcaccaataagcatttggctataatggacaatttaaatccgagttggcatttctgaagcacaagatagttgactcaacacttcacatatttgtttttttccttgtactatttttctataatatatagatcgtcacgtaccatcagatcacagtgaattaatcacttttatttaaattcgtttttatattctgtaaacaaaaaaagcagattgacatggtgggttaagggtttttgctccactccctccttccttctcacacatacatgtatgtgaaaccctttgatttgattcaaatacaaagtacagggcatccccttggcctaccatactgacaagtaaaaaccagattaacagtttaagttattgtttgggctatagctaggacacctttatattgattatattaactgattgcttatttttctatatagttgtaaggtttatgttgatttaccttttttttttttgaacaagctaaactggatttaccttcatagttatggatgactgcacaactaatagtaataccttattatatgcaggttgctcca

SEQ ID NO: 14759 - DNA, 1358 bp, Setaria italica
  Intron number 6 from transcript Si010421m (locus Si010421m .g) derived from phytozome v7.0 (chr-ID scaffold_7; pos 22 178090 to 22179447)
gtaggtgggaagtgtgctgccttttactatttgccgtgctctgccttttactatgtaccatgctagcatggaaaaatattagcatctctgcggaaaagcaaatatgatcttaaggatgatgacattttccccccaaaaggacacttgtgcatttgctaaatttatcaaggatccatagatattaaacttattaggatgtggacttgccaaaatgcgtgcaaagatgtgagcgcatgctgttttagggcttctaagacaagaaaacaaatcaaatggagaactgtggtgattggaatgaaaacacctgctttgctacatttcatttctgagatgcacttggtaggtgttcaatgcaaacagtaaggccacctggttcttttctgtcaaaaagtagaatcatactgtttctgttagcaaagtaaattgatttccttttttttagaaatggagctgcagagcttatctagaatatactatactatattacatgcttttgccataacattggatataatggctagaaaaagtaggcagaagacaattacttcgtttcttctcaaacaagagggctttgtgttgtgctatttaacatctctgctagcaagtttctatttactcatcatccagtagaaatgagctgatgtctcaactctcaatatgggggaaataaaggtgcaacctgggtttatagactcaccattccaaccagtgctcttaaggtggtacctttggtgccttgggtgtgcctaggtgacaaggattgactaggcttcccgtggcaccttatcaccatgacggggatttaagaacactgattccaactactgttgggaagagtggctatgttaagaatatttttgctgaaaattgaacctgcatagtatcttccagaatttaaaaggccttactgtttgcattgaccacctaccaagtgcatctcagaaatgaaatgtagcaaagcaggcgttttcattccaatcaccacagttctccatttgatttgttttcttgtcttagaagccttaaaacattgttcaactaggaccaatattcttcagctgcaaaccttgtttaaaacaaattactgtttcttacaaggaaaacaatgttatgctatgtgtttctaattttctatgctagtctacattgttttcttgtgtattttggttgcaactctggatcctccagttgattggttataacttagccctaaacacataatcttcaacaatttcttgaaaaggtttattgcgatgtattttttttctgaaccagttgtttgtctagttgaatatgattttgatgaatgttttttttacaaagggcccgaggaagaagattctccttgcattaggtcc

SEQ ID NO: 14760 - DNA, 2759 bp, Setaria italica
  Intron number 2 from transcript Si018066m (locus Si018066m .g) derived from phytozome v7.0 (chr-ID scaffold_1; pos 27 01181 to 2703939)
ttcctcggctgctgtgcaggccggatcttcctcaggtgttcacttctccttgcttacccagtgtctgtacatcgcaggtagacagtgattatgttcactagggctttaaccatgccttggtctgtatctgtatgtgcgccttttctcaaggagttattcgtatatggttgctgattgtttattcttctccttcaattttctgcgtaagggtttgggatgtgtgcttttagcggccttttttcttatgagacgacacaacgggaagccacacccattcttgtattataatttgaagaaaaaaatcatcccatttcatggaaaactgttaggttgaattagttcattgcatcacaatttctgggcaacttatcttttcatctcatctgttatttagctacatcataatttctttctgagcggatgcatgaattaatagcatagtgttggcaaaatagccgatttcgtcctttaactttcgacaaagggtcaagttcgtcactatacttttgaatgagccgggccaaattagtcctcgaacttcacttctccgattcaatttcgtccttgatcctagttagacatccatgtagacgtgccatgtcattaattgcaagaaccttcttcctatatccatacgagcaggtccggtcctgagatttcggtggcccgggtcgaaactaaaaggtgaggcccttcaataacgataatatatgtgattttatcaacaatgatttattgatttcctcttaactcaaaaaaatctattgatttccttttttttcttttctcactgcccaatgcatgtagaccatggtagcatgggcagagccacgtggaggtggggtggggcagccacctcagctagcgctgagcttgctccagtaccgttcccacccatcttctttggtgatcctgccgagctctgaccccttgctagtcacctcttgcgtgaaatgggtaaaataggcagcacccaactgggcctatggttaggcatccagcccactaggcagcaggagcccaaacaaagtataatagccaggtgaaaggcccaccactccaatcgatcccctccgtcctctcagaccagccaccaaccctagcgctagccgctcgggattagcaaagcggcggcggcggcgtctccgatgcacaacgcagagcacgcgtgcggcagcggccccgagcggtagctgtttctcatggagggagagaaagaggaagggcttgccggtgctgggcaggttagcctcatggagggagagaaggaggaagggcttgctggtgctgggcagctcagcctcatggaggaagaggaggaggaagggcttaccgatgttgggcagctcaacctcatggaggaagagaaggaggaagggcttgccagtgctgggcagatcagcctcatggaggaagagaaggaggaagggcttgccggtgctgggcatggccatggctctggcgaaggccgcgcaataggggtggctccggcggcggcggaatcaggggcggctctggctggagtcatccgagggcgagggagagaccaaggtgccaccaggcccacacccaagaacgatattggcaacaagaagaccaaaaaaaatggtaatgttcttgtgtactcacctatttctttctatttttgtatctggcgcaagaactagcaatttattctacaaatttgaggtaacatcttaacttgcatgaacttttatgaaattgcaatatatggatgcgttaatgcggtgtgaattggtgtgttttttttgttttggtttaatctgtcattagaagccgcccaagatatattttttcctagctccgccactgcgtgccacgtatggcggcatgtaatccccgtccaaaccaccatgcttctatttgttcctcgagcaaccgttggagctgccaaaaacaagtgaaatcaggctatagaaaggaccaactttgaacaccaaatggcaaaaaatccaatttgggggaaaacagatgccttgcctccatctttgcatgccttcgatgcgattttggactttttacatgcgcagcaaaacccaaatgtgggcctggatgacatggcatgtctacgtggacgtccaactaggattaaggatgaaattgaatcggagaagtgaagtttgaggatcatttggcctgttcagaagtacatggacgaacttggccctctgccgaaagttaaaggacaaaatcggatattttgcccatagtgttggatcatgcaggtggaacgcaaagggtgccccagatcatgtgcccatcttgctgtgtaaagtggttatagtgaaggtaggttcagtgtatttccttgctgcccgtggccgctccccttgtttagagctatctcaaggggacgtctctccatctaatgtactccctctatatggaaatatttgttgctattgactttttttcgcaacgtttgatcattcttcttatttaaaaatttattgcaaacatatgaaaaaattaagttattgttaaaatacctttgatgacaaagtgagccacaaacaaaataaatgatacatacatatctttttgaataagatgaatggtcaaacgttgtgatcgaaagtcaacagtgacaaatattttgatacggaggtagtagtttttttttaccatttcccttatatctatatgaatataagcattacgaattcactactatgtttatcttatctctttttgtctatttcttcacgctaatttaatgaaaaccagggagcatttcc

SEQ ID NO: 14761 - DNA, 1122 bp, Setaria italica
  Intron number 2 from transcript Si026942m (locus Si026942m .g) derived from phytozome v7.0 (chr-ID scaffold_8; pos 15 21371 to 1522492 reverse strand)
cccagaatcgcgtcatcgtcgagggcaagaacttggtaatttgttgttccatgctctttccccagttaattaactcgggcgtggaatcagtttagaagatatgtgtggcatcctacaactgtgggttaaattggactcaacacagttacttagtataattggtatttaggtttttgcagactggccgtgtctattcaattaaggccccctagataacattgtgctctatccgttccgtccaaattcccaaaccattatagttgaaaggtggcccatcgtaaattttatgtaaattcttcagacttcagagttcaagctagtgttggtactgtgctcttggttgaaaaaagtgacgttagtagttagatgatgcccagtttttgtccttgttgtgctgctttgaggctgataacatgagttttacttgtgaataatgtagctcttcctccaaactgccacagttccattatggcgcaaagaaagtagttgtgcgcattcatttatctataggtggatgttggccattagctttacaaattggttaaatgaaagaatagcagtgacactcaaggggaacaagcataccaatatctcctgtttatatgttttgtcaagcataatttctttcagtatagcaaatcattatcatgttgcatatactgcaatgcctctttacatgctttactgtttttctttgggacatgtctgccactctgcctaccatatcaacagttacatactggcgtaagaccatctgaatttgtagctgaattaacatgcaataagaccataagttcatgaccaatagatgttcaataactcaactagttataatgtggtagctgagggctttattttgcagaatctgctgtgttgaataccagacaggaacaaaaaaatatgcagtttttctcatctgtctaaaatcattatgtatttacttaaaatttggtgcacactcggtgtttatttattctgggtactgttaactgcaaccagcaagtaacatggtttcattgtcttgtgccttttcgtgtcctcttgcgcactaggaattacatagatagttgtgctttcatcatttcaggttaagaaacacattaagcaaggggaagggcacac

SEQ ID NO: 14762 - DNA, 1860 bp, Setaria italica
  Intron number 5 from transcript Si035541m (locus Si035541m .g) derived from phytozome v7.0 (chr-ID scaffold_9; pos 22 937901 to 22939760)
gagttggccagtggtcatttgaaggtaaaagcacaagattttttggttctctgatttttctatttcagccttatgaactatgcccagccttctgatgccaagttttgtcactacatttctatccgtagtatgtagctacatacacatgtttaaaaagcagttcattgccaggcaaactcactcagtgcttgttctttagagaacgaatagaggtgtggagctaaatttatgaggggacgttgttagttggagaacaaatagtagaacactgactgaaattttaatgaatgcttgatattcaatgttctgtggatactggatggaggaataaaatagtaccgacctcagagaaaatcagtgaattaataattgttatgaaggatagaaagcaattttacttagtatgaagaaacttggattgtaggaatgagcattacagcaggattgttgtgcaccccacatgttctatattgggcttgggcatattttggaacctttttttcacatcaaggagaccaccaacacaagcttcttcccatgtgctcacagaatgtgacctccctgagaagtgagaacttgtttctgcgagtttcctagctagccagggttcggtacacttctttaagacaaaaccatcagatggcatattcccatggctgattttttcttccagcctgctaggaaattttatgaggtcaagattctatgaattaaaaattctttattttttatgtaaagcacatacaaaagcctagtgagaaccatattaagcttcgttgcatttaattctgtaatttctttcagctagttgaatgggaagtaaactaaatctattgccataaaatacatgacaatgacaggaccagaaatgacaaggcctgaccattgaactgaaggatgatgatataattacctttgattttcagttttcatgtcttgatccaaatggcatgacgaatgtacccattaaagagattaaatgtacagcaatatactactccctcataaataattcggaagatttgactggttgaggtacagcatggccccaacgagatgtagataagcatgtagactaacaagttgacatacaaaaagttgaaaacgacaggagctgggtgatttctctatctctacaactgcacacatttcacctactcccagccacaaaactatcaaattgtattaaaagattgtaagcgtacttctattgattaaataagaaattggaagtgttaaagctgttttatttaggagaaaatattatttgaaatgtctaggcaaggagcccaccacagtctccacatgagatacacggcagataatttcagcgatagtgttcatatcagttgttgtgttggcaaaactcagaagaatttggttgccagataactgtattcttaggccctccacagtgtactgttgaaccaatgctttaaagcaacttttttggttttaggcatcatttctactggtgctcaaatactgcggcaaccgatgcctgataaaattttcttggctttggggctagaacatgcgctggtgcttgcttattgaaaatgtgttacaggcatttggaaggaaatagagaggagatgagtttaagatttttagttctattttgggtcccagctataggaagagactgatgccgcacattcgtgttagaagtgaaactggcatctccaatgacatgatgtttcaagcatcagtagtaaagctacacgttgtgaaggccttggctctgtcatcatattgagctcacatgttgtgccaccgctagctgaattttaagtgtattataatagttcatgggaaaaccacagccagtgctgatgtaaattctgggctcaggaatca

SEQ ID NO: 14763 - DNA, 1454 bp, Setaria italica
  Intron number 3 from transcript Si010141m (locus Si010141m .g) derived from phytozome v7.0 (chr-ID scaffold_7; pos 34 662021 to 34663474 reverse strand)
atcttccctccacaagaagtgagttggattgctgtatctgaactactttatttactccaatgtgccccaagtatctttctgtccacccacagagacttgcacacttaaaccatttctgtgtgcattataggaggttggcaggaattttttttatcttcttgtaaaagaatgtctagggatgaaaatggtcaggaaaaaaggtctaaccacttttgatttcgtatttttatgcgggaacggaacgaaattgggaaaactcggtcgggaatgcgaaatcggatatacgggatgttggaaacgaagcaattcgatcggaagtatattgataatggtcgggaatcgataattagcgggaacaacaaaccacctaaacacaaaaagatacaaatatggtactaccaactacagtgtgcatagtagtaccgcgtagcaaatatatgcgtatattaccaagttatatgattaagcctttattttaaatggacttgtgatgtgtcatacacccatagaataatagaacatggaatgttatttttaaatcgtcagaatatttatgcaaataaaactacagaactaccaaaaaaagaaaatggaaaagaaaaatgaacaaagggccaaaccttgctgctccatgcgtgaattcctgggccaagcatggaatgatgggccgcatgcatgactcgtcagctccttgcctcctctcttctaatgcacagaggccagccgccagcaggtgcatttagtcccaccttgccaagcgaatcaccagtgtgtgcgcatgtgagctataaagcagaccgaaggggcggtgggcaactgggtggggcagttgagtcttggctgtgtttggtctaagatttgaacttgctaaacgggtgaaaaccgggataaaaacaggaattcccgggtggaaacgggaatccgagaaaacggtcgggtaattccttaaattgtgtctgctcctgttactgggactcagctcccggttcccgaccgatttcgattttttccccagcttatccggaaacagttgggaaaatgggtaaacggggtcagtcgggacgggaactttcccggcctgttttcacccctaagaatgtcaatgtccagtcccagaggctgaatgcattgcctgtttctcacttctccacagtgagcctacatgattgtaacttggttcagtagctttcgcatagtaatgttagcattagctgtggatctatgaatggatttgctgatcactccatcataatttctaattgctgtcattacaaagttatctcaaaattaaagcctcaagtttttatccagcaccctgtatttgcctcctcattgttgaattagctaagttcctccatgtgattctttttaagaaaatcattatactcatgctcatgaatagtcattctgttttaccagccaaatctgctacaaaaatttgacacccagaaaat

SEQ ID NO: 14764 - DNA, 918 bp, Setaria italica
  Intron number 2 from transcript Si006583m (locus Si006583m .g) derived from phytozome v7.0 (chr-ID scaffold_4; pos 38 526207 to 38527124)
agaagggcgccaaggtcatcctggccagccatctggtgagcagcggtttttctttaatttcggtatcctgaaggttgcttttgtcggatttgtgttcgagtttgtgagattcgatgctacgtttaggcgattgggtatttgggtgtgctagagcatcggatatagttctgtgcaagattttactactctatttatttgcttgtagtgaactgtatttatgtgtcaaatctatcatcactcgtcagtgaaaaggtgattacttgaaatttatatgtcagttgggttgcggttacagtcagagtgatgagttcactaaaaataaaaggggaaacttgagctgatagtggtgcatggtgcaatactgcatcttttaaaattggacatgcacagttgattaatcatatattcgttgtgataaattgttttgtagttgtcttggctaatcaaaatccaaagaatctcactcaccagtgaaatggtgattacttgaaatctatctctcactttggttcaataatagtcatggtgatgacccaaaaaatggggaaacttgaactgatagtggtgcatggtgcaagactgcatctttttaaattggatatgcccctttgattaatcatacattcgtcttaataaattgtttagtaattgttaactaataaaaattcaaagccatctctgtaacattctgctcgtggtctttagtttgattagtgtcatctataaaccttcaaaaatgaaagttttcattataaactaaaaagtatagctgataaaaattctttatgctctggacaattctttgttcctccatgttggtttttaagctttaactaatcagttatctctatttctaatcactgatccaatgttattttttcagggacgtccaaaaggtgtcactcccaagtacagctt

SEQ ID NO: 14765 - DNA, 1196 bp, Setaria italica
  Intron number 7 from transcript Si025976m (locus Si025976m .g) derived from phytozome v7.0 (chr-ID scaffold_8; pos 39 772929 to 39774124)
gatcgctgacactaaggttcacactgtcccaccttttggcagtatatatcaatatatgtttatgaagattattccactggccctcataaaaactgatttagttgagataatcctttaatcatttgcttgtaaaatagagtggatcaggctacaactaggcttaattgaggatcgcctttggttgaccatatgactagttctgcaggtgtatgtctagccgcccccggccaaagtttgagccctagtcttattaccattggtgttcattgctttcagaagtaaacacacatgtgtagtgggaaagcttgtacccgtgtacatgcctccaataacttgtgcagctgcggtgatcttacagggtgtcctgcacgtactgtctagaataatgccctgactgagggtgaggatagatcaccagacagataggtgatatatggaatattatccttttattattatggtactgttcaaaataatgtttagtatcataagaggaaggactataatttggttattaattagttagtgtcagtatgtagttactattatgtgcatcattgctcacatctgtgtataattctattgtgaaaggggtaggggggtgcattttatgtattcattctgatggtattgaagattcatagaattattctctttcgtttgtaagctagttcagcaaatatacttacgtctgaaacagagatctttgcagaattcgatgaactaatcttaatctttttattccaattttgtgtttactaggactgacaacaatccggacctttgtacgaaccctgcttcctgtgacccaattcccaaccaaaagaatagaatacttaagatcatcattcctacaattattggaatcattattgtcgttctacttgttgcatttaccattagatacattcacaaaagaaaaaaggaaacaggtaactaattaagctggctgaaattcatgagaggaattttttattctgttcatttaatttttaatttgatttaagatttggtgcatggctcacgatccgtcataggagacaatctggagccacagcccacaggggacgatcagggcctacaatctatggggagcaatcagggcccacaacctgcaggggacaatcagccctcacaatcgttacagaacaaccatgcagacgtgcctactggtccacggattcagagcttcaggt

SEQ ID NO: 14766 - DNA, 706 bp, Setaria italica
  Intron number 1 from transcript Si034607m (locus Si034607m .g) derived from phytozome v7.0 (chr-ID scaffold_9; pos 42 48208 to 4248913 reverse strand)
tcacaccaatcatcaggacgagcttggagaagcaagtgagtgtttcttacattttgtcatacacagagtactatctgtattgcacagttgtatttggagctataaggcacttgataacctccagtgtgtattgaaaggaaaaatgacacaatttgtcattgtcatgtgcatgcagttatgggcctggaattgatcgtataaataagagattagttaagtttttttactttgaaagtctgaggattgatgatgatttgtgattacaaccataattctggaagtagttctcttattatagaatttcatttaactatctttcaaatgctgaatgcattctgtggaatagttaatcatcttcagtataacagtataagggatttgagaagcatgcaagcaaccaaatatcatgcagatacttctgattaaaccttcaggacaattcatagtgatgctcagattcatgttggtgaacattgaggttgctgctgctgttgcactaacgtgttcttgcatgatgtgggtggcatactttgatgatgtttgatatttataattattagctttagctgatgcggcagggttatgtatttctatgttgcatgtagttggggttcattctgtaattctactatgtttatagtgtaccaatccacattttgtgtgtgttgcagggttacaaaattcttggttctcatagtggagtgaa

SEQ ID NO: 14767 - DNA, 719 bp, Setaria italica
  Intron number 3 from transcript Si026672m (locus Si026672m .g) derived from phytozome v7.0 (chr-ID scaffold_8; pos 16 927015 to 16927733)
aggtttttgttgtctcattttgttgctccattaacttcagctctttgttgcatgaatagatagatagatgcagaattgaatcctttccagtgaaagcgagaattcgtcctggctgttgaccaatcaatatggactagacgagtagctgtgctttagagtagagagtactggtttggcctattcattctttttcatcataataataaactaacataacattgccacttcagtttatttaccacagactatttcctgtaaatcaaaataagagcaggactccttgacatttgctttgccatttacgcttagttttctcttgcttatgtgattgctttgaatactaagtggcacatgctctgtttttgcattagtagatataaatatagctgtagaaaataataatgagttacatgttgtaaactgcagttaaaaatgttaaatgaaaaagaatagagggagtagcaatagttttcatcatgcactggcgtgcatgtaaacttattttttttcgaaaaacatgtaaacttatttttctgattgtaggctttaatctgttcgattttgtcttgtcattgcatgattttgctactttgtccttttttctgtaacacttcgacaacctaataagtggtacatagtgtcgcataggtaatttttttctgtcctcttatgcctcctgtgcagttctggagtgttgaatttgaagcagctctgtttga

SEQ ID NO: 14768 - DNA, 971 bp, Setaria italica
  Intron number 2 from transcript Si031092m (locus Si031089m .g) derived from phytozome v7.0 (chr-ID scaffold_2; pos 82 65782 to 8266752 reverse strand)
gggattcatctgacttcaccttctgcaaggtacgtgtggtgctttgtagtgatttgtacctttactatgtcagtgcttttcctgatactgaaaacttggtgctgaaaactgaactcatcatgttttgtggggtgataaagagtgttatgaacataaaaacaccacttagttgttgagggattatcatatggattgtgatcggccagatttatgggccttatgctttaccataccatagataatcaggtgtctggtatttgtttcaacacaataatggatagccagaagtcttaatagatcggtgtggtttgctttgtaatcggcgatgagcatggaatcatggatatggtttcatccgtatatgttcatttctgaaaccagtataagcgcatatgttatatttccaaacactatgcgaataagtcaaggggaggaaataagaaacagggaaagcatggaaagtttaatcctacagaatgggagaagggctctggttgtgtttgtcttctctttgctgtatggaatgcacttgatgctgttctttcaatgcatgcattgaaacagttgctcctagttgtttttttaatgtcttggttgctgatgctgtaggattgggtcaattagctagtgtatctttattggcactcacttcattacccttttttaggttggtagttggatatcgctcaagtatataagtaccatatagttaagaactatttattgtcttcactttcactgaatgcacttaattgcttgatgagttgtcagtttgttatggtagtggtctaaacctcttttattgaatatgtgttggctatttgtccctcagcccgttgagttgctaagagcatccaatggcttgactcagaaacttacaggtggtaaatttgttgcttcttgtttactttctgaaataggacgtacaaacttttgtgttatatctgttcaggttacttctgaagaaaacg

SEQ ID NO: 14769 - DNA, 566 bp, Setaria italica
  Intron number 11 from transcript Si000263m (locus Si000263 m.g) derived from phytozome v7.0 (chr-ID scaffold_5; pos 3 2524961 to 32525526)
ctaaattgctaaggtatttgaggatgtgacgtgacattgaatttgtcatgtgagaatatactgcttctttcctgggcttcaaatgatgaagaatttacaacaatttggtttttagcaaggttaatggcttaaataagaaatctaaatcatgtgatgcaaattaaaactgtgggggtattgcatgtctcaaagcttatttgatattttgcttatcaatctaatcagcatgaaacatatatttcctccgttcttcaggctattctgtcacttgtcagctcacaagccttagtcatatgcaacttcatgcataaaaattggtctttgagtaacctgcaactggctaatgcttagtattctattaagaccgttttcttcattgttttcttggtgaataaggcaaggtgctagatccatatagattgaacttcatcatgaaaatttggagagatgtggctgtgatttactgaactccttgctgtagatctagggtgaaaccatgtgcagactcctgcttaatagttatgtcttagtcactctgtttacttcttttcattccagatcacagc

SEQ ID NO: 14770 - DNA, 753 bp, Setaria italica
  Intron number 7 from transcript Si029045m (locus Si029045m .g) derived from phytozome v7.0 (chr-ID scaffold_2; pos 39 166495 to 39167247 reverse strand)
aagatacagtggaagatcgtattttagctctgcaggtaattattctgaaagtttgctgagatggatttttaattacttatgggtcatgcgcctaactattgttgttattatagttttgtttagagtatgagaattatgtaatagaatcagatgctatttaatcatgcaaatactccctccgtccatgagtgtaagcactttcggacatcgacattgtcactgatataagaaattatttaatatatagttgttttcacaatgaatctactaacatcatttctatgttgtcatttttatgattttttttgctattgatgatagtgagcaaaaatgtttgacttatgacaaatattattgtttagttggttgtccaatccgatttgtgagaaaattatttgatgggtgctcgaatcatgtctagcttgtcgcgttgcattgtgatggctaagaaatgaaacatgatagtgaatgaaaccaattgctttattcctctttggagaactctaaatagctgagaacggtgcaaggagaaaaccaagcgactgtgctcaggtttaccatggcactttctgcttacccttagaactgaacagctatattctacttagcaattctgggctattatatttctactagttctgattaagtcatcatatcatggaaccaactttggtgccagatattactttacttgtagagtttactaccattttgcttatccatgttcccattcaacaggaggaaaagagagct

SEQ ID NO: 14771 - DNA, 1583 bp, Setaria italica
  Intron number 1 from transcript Si007067m (locus Si007067m .g) derived from phytozome v7.0 (chr-ID scaffold_4; pos 12 776446 to 12778028 reverse strand)
gtcgagctctgcaccctgaattccgcggtcgagtttgttctttttcctgatttgatgtcctccctttggaatgatcctatatgatcaaatatctttagctctgttatcatctcaattttttgtacatttattctaagacagataatacttcaggtaaatgcatcattttgtattagataatctattctgcaaatgcatatcattttgcatagggaaaattggatctgcaccatcaatagatccaaagtttagaaaaataccaccaaaagattgaactttagaatattatcattaaaaggttactccgttgttgccttctaccattctgttaactggacgttatctagtgattgaaaaaaagaagctcgcatacaccccagccccaaacacacgcgcgaaacagcagaaggggattgccaagaccatatgcctggcgaagcacctccctggatgtggtggctccaagttcccaagtccgaaccctggcatcagccatggcttcgcggaaccgcaggattggaatgtgggggccacggaggacatgccgtggctccggcattgaatgctggtggcgaggcacctatctggcctcatcccatgggttccagcgactccagttgagcggctgggaactgcttccgctggggagccacgatcccctttcagggctgcgtgtgtgcgtgtgtttgggggctaccatcagagaagtgtgtaggctatgtgctattcgttcttgagctacttagagaagctcaagactaaaagcacgtggaaaaggcatggaattattaatctgccacacgcatggaaggagtataactgcagaaggtgcaagtgtaaattaaaccaccatcacgctgcccctagcggttgctgatgctgccactgcaaactctgcctcatctgatcgcccttgctggtccgcatattactggaagaggaggtaccagcatgagtttttcttttctttttccaatcagtagttaacgtcgagttaacagaagtggtagaaggcaataacggtgtaatcttatgatggtgatattctaaatctcgatcttttaatggtatttttctaaactttggatgttttgatgataaagatccaattttcccttttgtataatgtatctttatttgactatttcatttgtctcttattattatttgtaaacaatgcaagttttcgccaaaacatctaaagtttacctttatctctaatgatctcagagtatatttgtatggttttgctagcaaaatgcctgattacatcttgccattacattcttgtgcattttgtggtgtttaccgttgcttagaaattcccttccctagaccctgcgaactttagcactgggtattccccctttcccttttccagctcaatgacatgtttcccatatcaacaccagttatatttataggccctgtttcaatttatctgagtttgcttgtgtttttttttctcgagcactagctgagtttgcttgtcctaaattaaattccaatttgtcttattttggtgttcaatgtcttctcatttttcaggtttcggcattcgttttgcaccatttctctgaggt

SEQ ID NO: 14772 - DNA, 718 bp, Setaria italica
  Intron number 15 from transcript Si033876m (locus Si033876 m.g) derived from phytozome v7.0 (chr-ID scaffold_9; pos 4 8472531 to 48473248)
gaagtgttatcgatcaggtttgttaagaaagtgacagttttcgttaagtgctacagtgcagagctatttattctgacgatttgtttctgaaatgtatagtttcattcattacattgttataaaaatctgatgaaggaatggaaatgatttcaatataatatatttgctttcaaggaaattggtgtcattaccttgctgctcattgttgctattgctgccaactcgcttatcgttattgtgggtgctccagtcaccacctcatcaagcatgataacgaatgctgtgataattgggtgttagggctggatcggtcttgtgggctgggtctgcctattgtttactcttttttttggcctcttcccctcttgccacatgtttttcattatccactcaaaacgctgcttgctaatttgggattatctacgtccaggatttcaaaaatcaatttgcgttagtaactgtctggctttgtaggtttttaacgctcttctgaaataatgtaagcactgcaaaaccaaggaaatgctgagaacatgattaaacaaagggccaaaggggggcatagttctcctcaaaataccagaattcaaacctgttcataactttgtaaagttttcttcttctaaaagctcatgagctagtgagttatgcagcttttccttatgcagcttttgctccatgtatgtaggaaacacagcttataccacacaggagaaat

SEQ ID NO: 14773 - DNA, 1848 bp, Setaria italica
  Intron number 5 from transcript Si038686m (locus Si038686m .g) derived from phytozome v7.0 (chr-ID scaffold_9; pos 81 79712 to 8181559)
ggggtactatttgccctggaggaagttacatcctggtacgaatgctctattacattttttacgtccctttcaatagacaaattgagacacataattgtaaaattagcgatttagagcaacaatagtccaatttccaagctttagtttaccaatcatcttttctgaatttaagaaactactattagttgaagaaatattgtgttgacaaatgagaataaccagcgctaacagctcagcttttgtttgccaacacatatatttcttttgttactttagctgctggcaacaatatctttagtactaatgcgattcaccctatggttgattgtaactagttgaaataacaagaaatgctttagtagcagcttctgttcgttcttgtctctctggtttgtcgataacaatatttttgttaagtaacataacttttatgaagaacatacttatactcatttcaaaggatcagtgtatatatatatatatacatatatatatatacatatatatatatatatatatatatatatattaaagtttgttgtagctaaaagatagaaaattgactgcatgctcccacatggcgaagaatttgtgtcctggtgcatttagtgtttccgtgcttactaactatggctgttatacactgcctcatgataggctgcgattctgcctgcaaaatcatgagtgcatgattgcaagggtgcaaattaattctagattgaattccagaacattctttgaaatagaagtttatcaggaactgactatctgattctgtcgcgtagtgccaccatcaagatctgcatgccagaactctagacttaacgagagtgttcattgtgtgtgtggacttggtcagagggtggtgggctgccctgaaatcccattttgtagtgttttcttactcttttgttttttcatgcttttgtgtaggataaaatcgagattttagtcctctacttttagtaggacatacccgagatattgtgaaatattaaggtcatcatttcacagttgtctttattactatcgatattatagttaactaaggctttgtgagttcattagttcaatgccatctccctttgtgatgtgtacattttctttttcaatttagtacccaagtgttcatatttctgtgcagcaacctttcacactgcataccaattgatatccgttgctctacatgaaagcttattttagatgtcagaataatgtttttgatttttgtgggtacttttactttgacctagaggcataaagtggatacagattattcatactgtattctacaggatgtgaatattgtttagattttgttacccgattaacagtttatctcctattcaccattgggaaactttataggaatatgggtgcaaatgtggtatgaggtttgggggtttgaaaatgttactttatcctgactactatcatattatgttagtcacatttgcacgcatattttattgcagcatgtctaactagctggggtcttacattttagtgtgattcatatttcttcttgtgaaataactaaattaaaatgattaattgctctatatatcagtatgtctttaatgccgggatgcatagaaaactattatgttatccatgtttgaccccaaactgagtggaatttcgatacatatttgtgtttgagtgtattcaaattcacatagaaaatacgaatagagatgtttttaatcactgagtcgtatttgatcagtttccacctgtactttgactgtagaaataacatattgctactataatattcatattctgcattggactacaaatatgattgtgtccccattatattgctgaaggtggagaagtcatctt

SEQ ID NO: 14774 - DNA, 1021 bp, Setaria italica
  Intron number 1 from transcript Si004751m (locus Si004751m .g) derived from phytozome v7.0 (chr-ID scaffold_5; pos 42 738816 to 42739836)
cactaccctcgaagcactcctgaggtacacaatgttgctgtggccggaagcatcatatcatgctcgtgcactcaagcgtgtcaacgtgccctacggatcgttgtgatctgtgaagttcatcttgtttgcatccaaatttcgctctctccaaaatctgaactcgacctgcgatcttcagctttgccagctagcgcaccgtaaattttctagacaattgcaatcttgcaaccgacaggacatacggtgctctttactgctcgatgaaaccgtaagatctgagatcacaggccatgcatgcccaccgctccccgagtaaataatcttggtcacgactctcgactgctcgccttcctacctgataaaacaagagcggttcatctaattaaaaatagacagaaaaatggcgatatttatttcatggcgttagagagctggtagcccatgagaaaaccgtgtgaactgttggcaagtgcacacagccacacaggtaggaggaaccaattgaagctgaaaaccgtaggccaatgcaaaatcttgattaaatgtaccatttcgaatttgcctttgaaatccatgattagcttttgtttttaacggtaaggaggataacatcccaaaatagattttgtagtgttctatgcagaggtagtgcgatcctcttttctccagccacttgataaagccgaaataggtgcgtcggactcaacccgttcacttgtaaattgtaatcttgcagaatatattttgcttgtatactgtgtaccacattacaccatttcataacatggaagacagacaggtacagttgtcatttcgcaagctaatgaactaacaatacaaaataccgaagcatttcaagcatttcgtgaagcaaaatttctgaaagatatgacgagtgcaagtttctttactcagtcaaattacaacaccttcatactttatatatgaagcccttaagcatactgaatcatatgaagcataaaacttcattccttataccaatgtgcaataaaattaacag

SEQ ID NO: 14775 - DNA, 1045 bp, Setaria italica
  Intron number 5 from transcript Si002726m (locus Si002726m .g) derived from phytozome v7.0 (chr-ID scaffold_5; pos 33 16122 to 3317166 reverse strand)
caaacggaagtcagtttttcatttgcaccgtgaaggtaaggcattcatgatctctaacaataaattaattctttttcctcaatattgtcccttctggaacaccttaaattttgcagcataaagcatctgttttaagtaatgattcatgttcaaatatatatgttgatcaatagatgttacattgatacagtcttaaagatgtaggggaacaagtgatatgtttctatacctacttagagttctttgatatatctgttacttcaggcacttcagaaaagttatatacacccttaagaactatctgtttgtctcaaaaaagggggagggaggagttccattcaatgctgcctgtttacatagaatcaaaattcctagaacagctcatgatatataccacatcctagaggaggtttcattcaaaactgcctgtttacatagaatcaaacttcctagagcaatgatgtatcccatatcctagagcgaaacaatttgaacacaaatttccactgcttcctttttggaaggtactctgaattaatatgacatcactcatttctattgttcaaattgtagaatgttttcttcagacaaaattgtaaaatatagtgtctctgttctgtttggaccttgggccaacgttgagttgtttggccagttttttttttttgaaatggtcagtcctaccttttacactcgcacatatccccccatccccacgtgcggggtaattttctgtataaaagtttattcatatgctttggtttattatatttcataagtcagcaccagacattttcaactcaattacattgattgggattgttagttatgtatgagcaagacaagatacaagggagcatatatacatctagatgtggtaggataatatatcaagaataaactatccccaatccaaacatacccttggactcctcatgtttgttttctccgtcaagaacctgccattgaggtttaattggctcacactcaaataatggaatgcttctcagacaccgtggttggacaaccgtcacgtcgtgtttgg

SEQ ID NO: 14776 - DNA, 2441 bp, Setaria italica
  Intron number 2 from transcript Si035279m (locus Si035279m .g) derived from phytozome v7.0 (chr-ID scaffold_9; pos 64 65740 to 6468180)
ctgaacttctttctacaccacaggtaaaatgttcctcactcttgatacgatattatatccatttttagttttattttttccagagaattgggatagataggagtaaagctgtatgtggtcatgtgagataacaaaggatagtgaagtactaaagttaataatccatgatgggctgatctgtcataacaaattaggtaaacattctgatattggtgtttaactgtcaaggctagcaatgctattcttgtaccatatatctagtaagttatgacttgacattcgttagattagtatatttctcaagccatctcttttgtgatgtacattaatcattctttatgggtttatttatttcattaatgagatacatgactcagagaactccttacatcgttttggtgtaaaaaatgttcaactttgagtgattttaacttgtatctgttcttttgctttaatggaggaaaaaaagaatcacagatgttaatattatcagtatatgctaatgattcaaggaaccattgctctatattagcataaactattgatatagatgcttaccattcgaagtaattatgacttgtatgttagcatagagaatcttacagtaggtagcatattctgtgattcccatgatttcctggagacctggactgtttgacacttagaccgcatagcttgacccgtataaattttatttactgctgatagatctcagtttagttcatttatgcggtaccacactcctcgtagtttcatactcaattgctagacataagagttcacggttcacaccagcacaccatacaaatttacaacatgctatttaatggtctgatgaaggaagctgaaataaccttcatctagcttttgtagaagctagcactgctagatatgtcccctctcttcgtgtcttgcatcttttgagcataaatgcagatgacgttacatctgaaattacatgggcagatgaccaaaatgtccccatattaatgtccatagaatgaaaaaaaattatttgatgtattccccttttaaatggcagctccaaaaaaacgtacttcgatgtcaaaaaagcgtatttgtaaatggtaatgggagatacaaaacaaacatgggaaaataggaacatcagtacttctgcatgtgtgccctacatgttgcagcaatgtataagattgcttcctatatgttctgcaacgagtagcagtggccagtggatagacttccttcaagctataagtaatttgtattttgtacatacgtgcgaggagcgagtaatgtcaatttggttgttcttcatttgtctacaaatacaatcgtgccagcatgttttagacctccgcagctagatttggaacctcttggtcatttgcataatagtttgggtctatgcggctagatttctctaatctctagtctgtatgagatatttggatttattggtgcatcatttctttgatattcctgtttgatgtactaacacagtggtgaaaagttgaaaagctaaatatgatttttgagtgcaaattcaagcaagggtcatactgtaatagcttgcagttagggccagttactcgaatcgaagtctcgttaaatgtcaaacagagtcttttatggtaggttttttcagggacatcataaattggacaaaataagtgtagaaaattctacctgtctgattattagagagcttatgtagattctgctacctaaaagagtaccatgccaataattgtccaagaaccctttttttagggatatagttaaacaaaattccaatcgagcacttgcatgatccgcggaaagagaactagaagtatgcactatctatcttcaagatactcttgcccttgctgattttccatgtgcaaccttctctggttgagaagctacattataatttggctgcttgtgatgattgttttggggtaggctgattgtttgttctcaaatctcaatgctcccatgcactctagtgttaattacctgaaatcaaataaagttagtttggcataagttatcttactaggaattaaatttcaagctccaagtgaatcaatagaggaagaggaacccatcaggatgagttaaaaaaaattaaaagtggaacttaaagcccatccaggatgaaagtgctagtgactaatattctgcacacatgtatttctttctgattgctttaagtagatttgcaatgcggctgaacattttaccctgacctgacttgattgaacttttggagtccattcatgtcatgggtgcatgaaaaaggagggctgcacattagattatcagatgtcttggttgaggcaatcattactaaatatatggtgatttgtcatttctgctggtgtcacagttttcttccactaatgatgacacctacccagccagtaatctaagtttagttcttgttcttgcagattgtggaagctagagca

SEQ ID NO: 14777 - DNA, 3459 bp, Setaria italica
  Intron number 3 from transcript Si003015m (locus Si003015m .g) derived from phytozome v7.0 (chr-ID scaffold_5; pos 34 633988 to 34637446 reverse strand)
ttacttggtaagcacatttgacatttattatcagttgtacagtttttcccttgcttttcagtctgtctgtttcatcagctgtacctgtgatgggttcgctggcaattaacatgcaagatgcagtgaaaggatagacggttggttttagtcaaaatttgaagaaaactgaatgaactcacaagtacagtgctacacttatcacctcataaaatggctcgtagatggtccactgcctcacgtatgctttagcagcacacatagttgggtatctcaaaaaagtacatataggtgccatttaatatgagctagtctcaacttcatcccgctagactgtttatcagataagagtatctatatggctcattgatccaattggaacacacaacaggggttcaaatattcatgtagcaggttagctgcagtaagagactactctccctcatataaccccattcatgtagtagcatcttcacatgaccatatgcagatagtggtctagccattcctgcccccaatcccagaccttctgcgaggatcatgcctagagtttgctcctccgtaatcataatcctgaacctctgtaagaatctttctgctacggccctgtatttagaggataaaaacataccttgattaagctaatgggaaacaaaatctaaaagtaacaattctgatatttgttgacatgattttagggttcagcaggctccatcattattttcagtttataagatattgttatatgactgtttcaggcatgattatgtatagctaaggtgaaaagtcaagagtttcggaactcaaataactaatcatctcaaatttaaatacaaacagaggagacaattgacagacctttatcagctttgcagtagcagcattatcattttcaactgcaatggtttggcctgcattagtagaaaagaacatgttcaggtgtaattgatgatttagcaaataatatattgctcagaaggaagagaaaatcccatacctgcagatgcattgaatagaaggattaaaaggatgacgctgagtgcaaaagtgtgtttaggcatatttttctcttctactaatatgttattgccttaggaggattcctggggaggagctactacacctctgccccttttatacatggatgctgggtccggcagctagaaaggaaagaacctgtaactttagatacggtcttctagtaatgattgctctacagggttatgatgaaacacattatcccacagctcaaggtcaactacatttggcagaagctactttagaagttgtactgccatctagtaactaaggccaaagtaaactacaacccagcctgttttagtagttgatgcatttcctgtgccttttgcattcttcttttctaatctgtaccagattatgaaatgacactttaatattggaatgttatatagcatcaggcatgcttggaattctttgctcatgaactcacgattatactaacttctaaaagacctctattatttcttgagcaaagagtattttatgtaatgatgatgatgcacgttggttacatagtaggtccctagtcattgttgtggcataattctgttcatattataaggaccatattgagtcatatttttttcagtagttaaaaaatactattatacgatcagcacatccatgttaataagttaaaactgtatcaattatcaaataaccaaatatttgtgataccagtataaattcggagcatccattgtaagagtgaaaatgtgtcaaataaccaaaatgttgatatactagtataaagtcagagcatctgttttaaggagtgacaacatatcaaataaccaaaaaagcatacaatcactcactattgcatggtgaatgcataactaaagggtcaggaactgtttgtggagtgagtgcacactgactgctatgccacagtgtgtaagaggatagtggagtgagggaacataatggaaatggagggaactgcaagtgcaagtgcaatagtaccctccaatagcccttccatcctaagaaaaaaggcccgccatcaaagaaaaaattactggtttattgtgttgtgggggatcctgtttgagatcttccctatcaagtgctattcatagcattgacatatgcacatattctgtggatttgtcttgttatatgtctaggttgtctttctgctacatgccacatgcaccttctttttatgggagattttatgacctaaccacgcatatatccactgttctccgatatgtgcaaattaggaagatcacgaccaagatgcaggtgtgttgttggccgctcattatgtcatcctaggcagcgagcacctctacttagttgaccatctatttgttcactagctagatttttgcgagagtaaaatgcatgctacaggagaccaatttcagagtcaccactttactattgactctagccactggttgttcacagccccaggtgcagctggattctagaaattggaaaccccactaccttgctgtcttggtgtgtgacaccacgtacaaaggtctttcttgaacaacatgactgcacatgtaaagaggctatatcatgacctgaaaatttcagcatcatatcgtatcctgattggtgttacgtatgtgaggatgcacatgtcaccatgcaagtattagacttagactgcatgaaaatgattaagtcgccactttagacaagttccatttcaaactatagggttagacgttgaccaacacttttgaacctgaccgcagctctttacttgggaagataaggaacttcaaacaggttaggaaggaggtggtgcatgaacaaatgattactttcttgttgacaccaggtaaaagcatggtgataatcgcgtaatagtgcacagttgtttcctacacgagttgtatagcgttaattagataagaacaatcagaaacactatcagtggttacttgtcaattgttaaatttagaagccttcttttgagcagtgaggcaactttctttctcatatgtttgttacacaacatgttttgggcaaaatttgtgtttccggagttcaaagcattttgtcctagtgcaaaccaacttccgaaaatggttttgctgtcaattctaactggaacacctgttgggtttagacgcatactttttatttttagacttcctgtgaggtgcaaacttgtagttcttgcagctcaggctgtgaaaagtagtttatagcttttgttgccttcaggcagttccttgatggtgcttgactttctgtatctcctgtatttctgatagtgagtgaggatgatattcgtatgttgttgttaatgctgtttgtggtattacttttttggaatttctttgtttacaagaaatcattgggtgaagtggaggagcaaagctacatcctaatgcagtagtcatgcttatggcttctaatttttcgtcattacatttatgcgtgtgcagg

SEQ ID NO: 14778 - DNA, 2076 bp, Setaria italica
  Intron number 2 from transcript Si038018m (locus Si038018m .g) derived from phytozome v7.0 (chr-ID scaffold_9; pos 51 561294 to 51563369)
gcaccgccgaggagcgcatccgtttcgagaaatccgtgagtggtcgattttctttgtgtgtttagatttgtttgctgtttttagggttttggttttcctacttagctttttaagtctaaaatgtgttaagtagctggttctcccccatagagagggctagatgtttagtcgggctatattgattctattttcttggcatctagtactttgaaaaacaccactggtagtatagagaaaaaattgaagtatggaagatttagaaatggttatggctggattactgaagtattggcaatacacatagagctggtttagaaagtgtggctattgaggactcatgaagtggtccgatcagatcttattatgatttttttgaaaggtttagtgttgctagtaccttcaatttgatatgccaggtagtaatatgattactccccaaattttaaatggctctggcaagaagcggatttttttatatttttgaacacaagttagagaaccagaaactaggaacaagatgcagaagaaaaattttggattggggtaacagaggaaacgaatgcactcttgtgttatagacacataacctattatccttcatgcataagcccactatgcaagtgacagacaacatgatacagatgagcttcacctattagcttactttttgtaaaggaacttcaggttttctcttatgctagaaccatgttactatatatcatcaaagatatgttcatttgcagccaacttaactaagatcaccatttcttaaaaggacgccgctcttcctaaacatttgcactattccatcattcattctgtcctgtgaggttggaatatctgtgttaagaacttttttctcgaacacgcaggagagctgcgtataaatatattaagaagaaaagggtttatgtaaacccaaaaaatacagcacaggtttttagggcaaacctgtacagaaaccccttacactatctgaaataggaaccttctatatagcaccaagacccaaaatctagaccaaggaccccaactgctcttgtgagggcactagggcgaggagatgtgaaattcctcgagccccagccatacaccacaagtgcatatcatctcttatggaagacaggacagtattcacatcaggcggcagtccgtcgaagacacaacgattgcgatgtctgtgctaagaactttgaagtttatataccttccatcccatataatatgcaggttgcatgataatttaccattgctgaggcaccttttgggctaaacttctcctcagtatctgaaatgctcttgtgtattgcagaagagtaaggcccaatgaagtcggtagtgcataatacactttttttttcctttaggaggaatgataaatgggtcttgttctactaagaaagggtaaccattgtggatcatgactggtgcatttcgatcatgtatcaatttaaggaactaggtgcacctgaggcagaagtatcgcgctggagtaatgttaggcacaaaataatagcgggtatcccctttattttgtagattgacaaattgaaacattaagtcagcatttgcaaatccattatccatacactgtgcagaagatattctataatgttacatctgcagaaagaacgcgatttttgttaaccttccataaagtaacccacctttaaaaaataggtgtgtatggtgagagttggccccttgcccattcatccttccctgctcattggtatctttccatttctttgaacatctgtagttataacatttactttcttatgcacagaattaacttttgtgaaacttctgtcgggttagtatccactcaaataattttcacatgtttgatttgtttgctcccattttttgtggttttgtgccttgtgagtgtgattctgggctgtattatattatcattacagggattcccccttacctttagaagttatgaacttatagccaataatcttatgcatgccaagaaatcgtattgccgtgttttataggaaggaagctgtaatattattttttctttgtttcttctgtgtctcaatgatgatttttcttacgcag

SEQ ID NO: 14779 - DNA, 3273 bp, Setaria italica
  Intron number 1 from transcript Si021721m (locus Si021721m .g) derived from phytozome v7.0 (chr-ID scaffold_3; pos 36 337013 to 36340285)
cccgaggttggtacctaatcctattcgtcttgttgcctttcgtaattttttactgcgaggaggtgggggatttcagatatagggtttagggatttttagagataggcctttgtgtttgaatcccgctggattgaataacatgacttgctgatggcatcgacttggaattcatttggaaaatcagatggttagaccgtttagagtgccccaaacttttggataaggcatgctggtgcagagacccctgtggtttcctgctgggttatgggagatatgtggtgatggtagaatatttctgcataaaccatgcaaaggcttggtgtgatttattgatcagctaatggcccctccccttgcttttattctgtaactatactctaaaattgactccctacctggcatggatgtctgctccacattttcctgacccaaacaaaaaaggtgtgcagttcaccttgtaatgcaatgctgtgtaacatcttcccccacccctccctcccccactaaaaaaactgtcaatgtttctttgtgcctgagtgatatttttgctcttgtgaaagtaccgaatagggattctagagtattggaactatattacctttccatttcttgcagttttattctaattatctgtgctactgacctttcagaaagtttggtgagccctgagcttcataaattactcacttcactctggttttatgtttccttttgtgttctacttattacaccataatactgccatattatatctcaatgagttgttcatgctttgctgagaatatgtgaacttagtgcgatttaggattaagctttgatttcaaatgtttagatcacccagaaattactattacggtatcaggagtgctccatttcattttgtggtctttaaggcataatataaccacatgagtttgtgaaacattttcgtagcgcttgtgattctgttggaatttggaaataatcttgcaaattagctcaatagagcaagtgatgcattgacaatttgacatcctttatgtccatgggaaaccatgaaattgatttaggcctatttagtttgtgatctatgctgtccatagcagtactacggtaggaaacatctatgttggaagaagaaagggctcgtcgtttgagctcacacatttcatgtgacatcaacaaggaaaatgatgagggactttgttttgtatagaaatcaggggcatttattggtagtttaatgaaataattagtttgatatcctagccagaccaaattagtgtttatattagctgagcttgttatggcaagtgtgccagcctgttgctggcccgcgagtactgtagctcgtgaacagtaccatgaggggaataagattggtttgttagcaggtcattagagataaggttgttagagagataaggttatttagattagactgggtttgttaggtagctggctatataagcacagccacaccatccattgtaattaagcaagaagaaccctaaaagtagtcagagcctccaagggaaggcgacgaacaggttctttgggctatccctagttctaccatatcatttggtattcagagccttagatcgtgcgaccctgccatcaccaaaaaatttttccctcctgcgccagattagattgatttcatactactcccacaaatcccccaaaacccacccacaaattgcatcttcgcatcaaccagccatagcagatttcaccaccttggttgagggcatcagatgcgtgtctgacgatgtcaatcacgtttcggaaaggctttgatcgcttcgcccacaacatacgtgagatattcagcgagctccgtgaggagctactgctcctgaagtacaatatcacagcgccaccatcttcaccgccagtgaagacccaacctaccgcaaccacgatggccatgtcaacatcgtcctcaccggccacggcaacatcttccaatctgctggcggggattgtctccactgctgattcggcggaagattcatacatcgtcgcggcacatgccttaccgccggcttcctcaccgatgattgtggctgcatcttctcgagcagcatcacttgtgccgctaccccccacagcaccaacaatggcaacgccttctcctccatgggcgtcatacctgattccagccacatcgcatccgccggcggcatctacaccaacaacactgccggcctacaacaaccacgcgcgcaggggccacagtcctcgcccgctgaagctgtgactagctatcgtgcccggcgtgtggacccgcgtgttcccctggcgacgtccctagcgctcctgcgggccagcttgctagcgctgcctttggtgcgctcgcgggccgacccgccagtgacgccccggagccggcagcggcgctgcacctgccggtcatagcttcgccggccgccttgacgcccgcggcatcgacctcctccccggacgctcctcttcagcatgctcgggcctcccagcagcttagagactctgcagacctcccgacctggtgcagtcttcatgccgccatctgcctacagctcgtccagaccttcaactacgtctgctcaagtgtgcttcatcgccaccaggttccagccacgtatggtcagcagctctgagcattgccacagctcgaggaagagctgtcttcgaggggtggtgaagtgttatggcaagtgggcccgcgtgcggctggcccgcgagtactgtagctcgtgaacagtaccacgaggggaataagattggtttgttagcaggtcattaaggataaggttgttagagagataaagttatttagattagattgggtttgttaggtagctggctatataagcacagccacaccatccattgtaattaagcaagaagaaccctaaaagtagtcagagcctccaagggagggcgacgaataggttcttcgggctatccctagttctaccatatcagagctagtcatgattatgcttcctgtagggttacatgggaaaccatctaatggtgaactaatcagttcacctggtttaaggtacattaagtaacctacctaggattggacttcaattattattgagcacacattgagtacatatatagttacattggcttgaaatctaataataatctatttcttgttttgccttgtttgctagcattgttaacacaagtaatgacaaattgcgcggtcatgtgcttgtaaagttccataatcatgaatttccttttgatttttcagctggccactggtggtggtggtggagatataggaaa

SEQ ID NO: 14780 - DNA, 1052 bp, Setaria italica
  Intron number 4 from transcript Si028911m (locus Si028861m .g) derived from phytozome v7.0 (chr-ID scaffold_2; pos 41 925267 to 41926318 reverse strand)
ctgcaggttagtgtatgtttacttctctgaaatgtttgaagtttcattttctattctgctaatgctaagaaaaggatctagaaatgaatgtcacacttttgacttcctgagtgttgacaagaaactaacgtccgtactattaagtatctctgctattaagatttttcacaattttgtgccccatgttactgaaattatgactcttgtcatgaagttatgttagtgtattggacatcttttgatgtcatttaaccatcagacacagacagaggatgttacttacacaacagcacgaatgacaagtgaactgagctttacatgtatggcaaatactgaaagcttgggtccgacaagctttgaagattcagccctattaagctgagcttgaacctgttcttgttctcaaatccttatcgatattaagcatgggtttagtcaagctctcttgacttcagcctaattaggcttgaagatatacatatataagtatataacatattatatccctattctggtgaagcttgagcttatttgagcctaatatatatttgtgcacatgcattgattgttatggtgcctttttaagttgagttcaagcattctaacatataatctactcaaagacatgcaataatgcaggcttctggccttatcaagctgagcttgagcttatttgtgcctcagttgagctgacctcaggctcaagcttgaggttgacccaagtctttactgggcttactcatgctcagcttgctgaggactctagttccaattttatttattatttaaaataacttccacatcttttgggaagaaaattgactgctttgtggccacctgactgggtacatgactacttgttgcatagctcggatacgtgctataacggccctatgctttctctggttatgctccaaattttttatataggtggcaaatgagacctcaaccgcttagatttatggctgtgctgattttcaggacacatgtaaacttaacataatcgttttctaactaccaaataacgttttcttttcaactttcaggatttc

SEQ ID NO: 14781 - DNA, 1865 bp, Setaria italica
  Intron number 1 from transcript Si037569m (locus Si037569m .g) derived from phytozome v7.0 (chr-ID scaffold_9; pos 24 04605 to 2406469 reverse strand)
cgacgaaggcgacaacggatacggcccgcagcgctgtgagaaccccttgagctaacacttttttgggcatgatctctaggtttcgacttttggttggggtttttggctttcaaagttcgcgaaattttgttgggggttcgcatgttgctttgaagttcgtttgtggaaatttgcgggcgaggttagtgatgctttgctagagctcgtggtcggtgatttttggttggggtttagggttttccgctcgtgtgtgcttgttcagaagatgatgcagttcgacttctttcgtgctcccggttttgtagttgtaagattttgaattcccgctccaggaattagctcccgggaactgtgatgtttcggcataacgactgaacacgaggtgcctggttggtggtttcttataaacttatagagctatatgcccaaaaagttatccacaagtatgaatgttatggccaactcgggggcagggaaacgctcatactagatcatccttctgtaggcttggtgccttggtgggcgtggtggtgtgtagcacgtgttttcatcccagtgtcctctgatggtttaatcgtgaattgatagttattttggaggacttttgggttaaatatgagagaatagttacagtactatggaaactaatttaatcagcagcatgtattgtcagtcagagtgcgggaaactgtggtatgatgtatctatccttctgatgaataatgctaattcagcaaattcagagtgacttcattatgtttgctggaatgcttgttcaatgacaatagcttgcagcaacgagtaacttgatgatcacttgtatcagtcattaatgtttcacagggagttccatatgttctaaaagggttcgaatgttttaggtaataccactaaaaatgctgcaattgagctatgatgcttagggatcactgaactaatgtacacattttacatgccagcacttgttttgcagccactctagggaatgttttagctggctagtacagggctacggggtaatttgaaataatctagtgagcaattacgctgtgaagtgtgaactattagagagggtagtctcattcgcttgcatgaggcataataatgcatcccccctttgtttgttgttgtggattgtgtcttataaatgcagcttgatattgttcaaagaactgagttttcttttccagatttactcatttatactacctggcacttgaaggtgtggttgttactagtttcttacagtcttttagtctcgtaaaaagaagcaaaagcatgcacttaatagctcaaatacatctcattgtgatatgtaaccagtacgagttcagaacagggatgttttcatcagtacatattattaggcggggcagtatagttgcatgaatagcatgtcatcatgcttcctttatttctgcattgtgctgcttttctgctctccctagtgatgtcatttagtgtttactacagatagtgctttgcaaaaccatgcaactgacctgcttgtatttggcatttctttaaacttagattgactaatatgtcatgtatatgtatcccagcatttttctgcccaggaactcgtgtgctaactcttccaggtagtccctggtgaattcatattagtttacccatacatgtcaaaacatgtatggataacataagaactgaggatatgtttgtcccgtcgtataggattctgttatatgcaaaactagctgcatttggtttctgccctcatacttatagtcattgtctctttgttagtacagtaacattgcatttctcatgcatctattgttcactgtcactttacctcttgttctaattgagaatttttattaactcttagctattgaagg

SEQ ID NO: 14782 - DNA, 3018 bp, Setaria italica
  Intron number 2 from transcript Si026481m (locus Si026481m .g) derived from phytozome v7.0 (chr-ID scaffold_8; pos 11 120768 to 11123785)
gtcgcctcgtggcccgacgagccggctgacctcaggtacacctactccttccaattctaggaataattccagttagatttgtttttagttaacttattagactaagtgttaaatgttcgatggaatcctcaatcatgacttgaggatatctatccaagagcacacagcaccacaaattattctaagttagtttatttattcatttgtgctaatctcattgcgtcaatcttggtcatcgtctatcttgcttgcataattcagcaatattatttattcagtcgtcgttaatttgattccattctgtaatagtcccaatcaagcacaaaatgttgaaaatgtttatgcttatattcgggcaaataatggagtctataatccctgccatgatgtcaattaccagccggcaggtgccgataaggattcagaatgtcttaataaagaaagtcgcagtcaacttcagccatgcgtcactgttactaagtgttggacttcggtacttctatggttacaatgtgatggaactcttctaagtcgaggaactgcagaagtgctttctgttcagtagggtagtatctttcgtaccaaaccataaactttttttcagtaacacagatgcgcagctggaccagtattttctctattaccatatactccctctgtccctgaaacaaagtcatttcatggttaaaaatttgtcacgcaaaaactttcatgttatgaaatttattatatgcatgtccatatacaacaatcaattagtataaaatatgactaataaatttgataaagtatggtcatttcaaaatttaactaatttgtcttgattttttttttctaaatcactttcttttagggacggagagactatttaacaaaaccttttgcagaaaaagactaatgcatgaacgaggttttgaagacaaatatatgcccgtctctttttccattttcccaaactgaaaaccaaaatgttttttttctaaattacaaatgtttcactgctggtaaaaatcaagtatttatcacaagttggtatcattgaaaaaatacaatgacctgaatgcttttccacccaattcaacaatccctttggtccattatgtaggttgattttagttccattacgtccatcatgaaatatgcatttaaacttatagaaaactatatttacagctataacatcaaattagttccattaagtccatcatgaaatatgtatttattctttggtattgtccatcacgcatgtgtcactctgtttctgtttataaggcacacacgcatatcaatattcaaacttaatattgttggatttgtaatcaaatgtactctccaattaatgattataagtttataaccataaataatataatataaattaaatgaatggtcaaagttaaatttggaagaccatgctatgtcgtatcacgccttataaagagaaacagaggcagtatgaacttggtaaactaaatcgaccaattttaaaaggagtacctattaataataagtagcccatgcatatccattcgttcatcatttattatacctacaagcacgtatgatgatatgcatcataaataggcatgatctacatgcatacatgattcatcatttacaagatctccttccaatttagatttttagttagtttacttactgaggtttaaaaaatttaatggaatcgtcaagcatgacttattaaggatatatatccaagcagaccaccagaaattattctaaaatctaaagtagttgattatgcattatttgtgctaattttattccatcattctttatcatctatctattgattgcatcatccagcaatattatttattgagggtgttgttaatttgatcccattctgtgaaaaaactgttgaaaatgtttgtgcttatgtctggataaaaaatggaggctataaaccatgatattatgtcaattacctgccgacaagtggcgacaagcattcagaatttccctataaagaaagtggtagtcaacttcatccatgcgtcacattgactaggtgactagatcgactttggtcattctgtagttataatgtgatgagactcttctaagtcgaagaactccaaaaagactcagtatctttggtaccaaacgactaactttttaacttttttattaacaacaccaatgtgctggctggaccactattttctatgttaccttaacttaatgcatgaaagatgttttgtggacaaatatacaaaagtttgatagctagtaaaataatgtcaagtatataccacccgatggtagatacaaagtcaaacgacctaagtttggatgattttccacccgatgctagttaaaagctaatgcttctgccgtgccaaaaatttaagttgtttctgttgtgtttcagtgaaacttatctaattttaactaacttcatagaaatgcaaacattataacataaaattagttctattaaatccattgtgaaatatgtattttttgaagttctagatgccaacatattttttaataaacttgttcaaaattactaaattttaacttacacaaatcaaaagtggcctaaaacttttatgggagtatttattaatcaagagcgcatgtaaatgattaatcttgtacgcatgtaagagcatcttcagtagtctcctaataaatgtttcccaataactagttaatagggatatctcaatatcattttcaccgttattggaagagttgcttttgtagtttcccaataatcacatcccaatccaactaccatattaggagagtcacaactcctcctttattcacggagagttagggtgaattattgggttgtcccaataattgttaggaaaagggaaagttaaaaggagactgctagagcactatttttttctcagttcttccaatatggtagttggattgggaaaattgagactgctggagatgctctaaattgggcttagcttatctatggtgcacatcatgttgcatggatgtagggaagtggcagcaaggtacgcc

SEQ ID NO: 14783 - DNA, 1984 bp, Setaria italica
  Intron number 1 from transcript Si028599m (locus Si028599m .g) derived from phytozome v7.0 (chr-ID scaffold_8; pos 12 436557 to 12438540 reverse strand)
agcgtccagccgctccggtggccgcctgctcaccggtatatcatgtcacactcctctaccttcccttgttctttcgcatacgtgctacggttaggcccggcccggaaggagaggggggggggggggggggggggcggctgtcgagctgtgcggccgatctgagccgcaaaaatggaggggcccatccgcatgtatacatgtatagggtataggtagtgctgcagcaggctgatctgtatggctgcttacgttacgtagttcagttgggccaggcctagaggcgacgagacgagcagcagctagaaatcccaaacgtcgcttgccctccgcacagctccgccgaaacgccgactcctcatctcctatctccttgtccacctgatgcctgatccgatctccagagcctcatcctgatgcctgattcgctccgggccaaaaaagtctcaggaccgggcctggctagggttcatgttttgcattcctggacccagtcctatgcgattcttcatttctgcctacaaacaaatcaggagccgtatgatcaggaattcaggatgcatggatttcagaatttcacagatttccatcgccatgagaaacaaatcctcttttttttcactgaaaatttactagtagtagcagtacatgagtattttcttctttaacaatctgataatgttattgatctcacttccaaaaattcatagatagaactaactgaggcaaaagtcagggagtcggttagtagttatctaactagttttgtttcggttactgcaaaagtcaaggagtaagcttgcagtaggagtattagaggtagtagtagcagcttaattgaggcaagaatatcagatgtaaaaaatggtagttgaatgataggttcttttttctacgaggtttaaatgattttaaagatattgcattctgatctcaaaactcaaaggtttaaatgataggttcttttctcatggatccctttaggagctagaactgctatatcctgcaatcacagtgcagtgtgtactattttaagtatatttgacctcttgcttaaactgaatattaaggcaaaaatagctaagtttattgcggcgttatgtcactaatagaaaagaatcaacctgttagagaatagcaatatgatattataccaggaactctatatgatccttaaatccttaataaaacatgaaagagggaatgtatacctccattctgagtttatttgattgaagcggtcattggcaagggacaaggtttattctgtgcccttaaattaatttgttgtgtagaactccccaagcaataactgaagtgaagtagcttggcattctaaactcatttccatattctacattggttaactgatcactcagttacttattttatctgttcttttagtttccttgtctttggcaatttttgtcacaggctcatagccaacttcttttactttcagcattatgaacatgtacctctgcattatgatttccatgtgctcttgttgaagtatctgtttcagatgcaattcgtgagttggtccagtctgtcagtagggaagggtaattcaagtctctttttcagatgcaatcagcttggacagtgggctaatgattgcattgtccgagccacttagtgcctaatgtgtttcttatgctaccttttatctaaattctgttttaataccattactgtattttttgacatgtatcattggttcttttctttttctgcacctctttgtttgtggacctgctaaacttgccctgcaaatttgcaatgcctcaattacagaaatatatattacaatgccctgaaatgatctgcccataagaacaagtagccttggtttgagatacataattctgattttccactttcatcatgcttgcaggagtgacatggttgaagtcttaaagatctagaaagctgcagttgctttggagtttccttttatcctgttttatcctcgagttggcaaggc

SEQ ID NO: 14784 - DNA, 3395 bp, Setaria italica
  Intron number 2 from transcript Si023367m (locus Si023367m .g) derived from phytozome v7.0 (chr-ID scaffold_3; pos 46 156624 to 46160018)
tgcccagtatgtaacttgttcaatcttgctctcttgtttttctatttgatatgatcgttcattgaactaaacgatgatgtttcctgtttagttgcttatcctcgcgttaattgaactatgttataagcatgcattctttttattgttacctttctctgatgtctgttgattctaaacatttcttgttactaatatgttatacgataacgggctagtaatagcgtatgttgtaactttgttatgtcatgtaatggaaaatgagcaactaaaaactcaaaactgcagcgatgtatgttacatttttagccaggaatatctcatatcaactattgttttatttggtacccttgctggctacttttttggttgccaaaaactagctgtctggcaaccttgcatgattccacaagaatttcgttgcgcatgtgggcaagccaaattggctctcccacatgggtaaggtatgctagctttttcttttggggaaatgggtatgctagcttgtgctgtcccatctaagacaacctcctgcctaattgacaatatgctgaatttatgatcccttcctaatcgatgtcctccctgctggatcgatcaactcaaggtacgaaccaggtccttcatattcggattgagctcccctgctaaatcaatttctttccctcccggatggtgcctggccatggaaatcatgaaaatcaaaggctggtagctcgaattgaattctggctatgtgaatcgaccccttcccctctggtgacgtgcctggcatggctgttgtatttgcctggagttggatctgtctgaatttagatgtatgggactgggacaaaggggatgggggagctgacatagctaatgaaccaaaatccacaccctttcctttccttgttcagccaggctgtgaaattcttgctggctagcctcagttgggaaataaaccatggataccctatgtccctcctatggtgtatctatccttatcgatgaaaagtaggagacacttactgctcatgattacaaatagaaaaaaaaatagcacacaccttggaagaaaaagcatagctcgcaccttcctgttctagatgtagaagatgagttctgaccagtgctatccactgatcacaaatacaatgttgtaggtccagccatgtggtggggacgataatgtctccagttccacttttccctccgctacccctgcatgagagattacatcaaggattatacaaaaatcattacacataaaagaacttataagctcattataatgaattttagcagcaccatgtatcccctataatgtcactgctttcattaataaaacagtcagcgctcctcttggcattcttttgtgaaagatgagttattacctgcgccttttttgaagcgaggctcttcacatgttcattgctaataatagaaataagaatatcctagttttctacattgcacgaatatgttctcaaagcaactaccatatatgcaaagagaccaaaaatatagaacatgaacttgtatgctggcaaaggaaggctattattgtatactactccctctgtcccaaattataggtcgttttgactttttaagattcatagatttttctatgcacttagatatactctatgtctagatgcatagcaaaaactatgaatctagaaaagccaaaacaacctacaatttgggacggagggagtacgagtaatatgaccatataggattgtaggatgcataattgactaatattctgttgtcataaactcaagatgatgcagttatattacctgacaagaatgattttatcaatttgtggtattgctttttctgaaaaaatcctaacgaatgccccattatattttacacttgaaaatcttgatttttttaatgtaaagcctttgttatattctatagatattattaatatgaatgattgacagaacatatgtgctatggagtattattgtgtgatacagcatatcattcattatgcattccataacgcatctagatgggttgccacatgacaatatttcgttttagctgtaccaaagtagcaaggcatgtactgaaaccataaaaacattcaacttcttactagcagcactcttttgtacctaggttgcctcctggtgtgggttgatgttttgcttaatgtgatgtggtctaaactttgtcatctatgtgcttgtttttgtgagcttttgttggctggtggttagtagagttgtgttgtagacttgctgagaaccataagttctcaaagaggcatgacacaaaacctatatataaagaccatgtttatttaagctggtatgccaaggggatctcttttgctttctacggaaaaaaaaaagccagaccaagcccttggctgaaacactaaaagcatcacacatattctgcagagcatacgcaatgctgctattgagaacctatatatatatatatatatatatatatatatatataatataccctccatggtcgtatgatgtttccatctctgacatctctttttggtagtttgcacaataattttcaactttccaaatcagccttcacaaataaaattgaagtctcaccaaatcacccttcacaaataaatagtcacacaaggacactgcaatagaataaatgcaaattctatgatttatgttaagcagaggattatttcctttgcatacgtgcttttaactaacatcgtcttcagcatgtgtaattctgccagcaaaatagcgatgcacacagtttgctgtaactaaaatctaatctgcaaacacatacattttgaataaatcaagttcatgtaattattttgaataaatcaagttcatgtaattattttgaataaatcaagttcatgtaattattttgaataaatcaagttcatgtaattattttgaataaatcaagttcatgtaattattaatacagtattgctcctctttgactgtctaggcgttttgcactgccaattaccatatttctgtgagcatatcttgtacaatctctaatgtggcatcattgctactagcatgcatgccttccctgtatcatgtatgccatatagacagaattattagcacaatgtctaatcacattgcaattttgttttcagtttcctggaggtaattacttttcatcttgcaatagttgtgccattggtagcgttatcttattagctgtggcaaagcatgtgtgagagtttttctaatctactttctgttatatacatttagtatgtaaatgcatctaacaagttctcactcaagcactttcttgttatgtaaatatgactacaactgtactgaaatggatgctgtttaatagtaaatttattttccacgaaactttcaggtatcaaacacagcttcagaagaatctcttgtatc

SEQ ID NO: 14785 - DNA, 2002 bp, Setaria italica
  Intron number 1 from transcript Si016852m (locus Si016848m .g) derived from phytozome v7.0 (chr-ID scaffold_1; pos 92 4998 to 926999 reverse strand)
caagcgccgccgcgaggagctccttaaggagaaaggtgcgccgagagattctggcccagcatgcggttgttggctcgctggatatgtttccctgcaatcgtgcgatttctgcgtcgattttgtgatgtggacgcgattcggctgtgaatttgtgggggaattcgtgtctcattttgggattttagggggggggggttaaaatcagatttccatgggttcctgacagtaaatgtattcaatggctaggaaaatggtggatgatagagggtaattccgcaattttgacgtgtcatgacgtgcttgtacggatagtctgacattgtgatctgtcaccggctgaaaaattagcagacgtacgaagaaatggacttatttgggttgtccgtacttcgaattagaaattcactaaccagaatattttagtcatgtatatgtgaatgtcacaatcaggcgctaatatttgtagttgacaatccactgggtgcaatagaaggggtgcaactcagaaattttgaaactgacttgtgataggcctctactctttaggtatgggtatttatgattcaatggtagatgtagccatgtaggtggtgtagttgactggctatgcatcaaacttggcccttaacaaggtgatcaattgtaataaggtaacctgggaagaataattttgtgcttgataagatattctgaggatggcaactttgtgcttgataagttaccctgggcattcacatcgagatgattgagaattgtaccatgaaatgcagacatttaagcattaacatatttatgtagtgggattagcatgagaaataagaaaaatctttgttggagttaccttattattcaggaaactaattgctgcattaccatcttataataataaatcaaagatacaaatgatctttgaaaataaaatctataccctttctttaagataatctttgagtattcttgttgatctgatagtcacaatcttaggtgctgtcttgtgcttcttattatgtcatttccacacttcattttgtctcaatgttggcgatacaaatcattggtcttggttatttatgttacattctgatttatgggcgtgcttggttcctttgctggggactgtattgctttgcccagcaaggataggcgtttggtagagcagcaaaaccttgctttgcttggcgagctcgctccgtccggcaaggaaatccttgctcgcccaggcgagccaaattggctctcctgtgcgggcaaggtttgtcgcctgcgccgaaaactctcgcgaagagtggcatccgctaccgttcaacgagctcacgcgcggacagattgacgagcccccggccaaatcacgcacagcccccgccgaaactaacttcagaggtctcaaatcaacaacaaccctgctgaatcgagctccacgagctccagtttgatgggcgggccgatggattgaggtcagcgagccccaaatcgacatgaagccgtgcagatcaagcgcataatcgatgcgggaaccaatcagatcaagcatcaaatcaacagaccatccggattgagcaccaaatcgccacaagctcgccctctagattcctccatcttctttgcatctcgatctctgtttctctctggaatacgggtcccaccaaattgcaaggcaaagaaaccaaacgctataatctttcttgctttgcgttgccgatccaggctgagcaaggcttgctaggcaaggccagcccagcaagggttccaagcatgccctatgtaacaatgtgttgcttatggatgctaattatgtttatgtaataagattgatgaaacagatatgttcttctccttaatgatgtcattgttgtgtacatatgatcattgttatggcttatggatcctttgttgttcattagattttcttctgtgctattttaattttaccatcagcctttgcaatttctgattgaagccatcttttaactaacaattcccttctgtagaatctacaactcac

SEQ ID NO: 14786 - DNA, 1551 bp, Setaria italica
  Intron number 4 from transcript Si019273m (locus Si019273m .g) derived from phytozome v7.0 (chr-ID scaffold_1; pos 35 190258 to 35191808 reverse strand)
tgaacggtggtcgttcgccttgctcaccactgtaagtattcccttttgctttacccaaggaccatacaatttcacattcagtaactgtccaatgctgtgtttcaatatgttgtttttttggtccgcgatgcttgattccttgtcaggataatttgtgaactcacgcacatatattctgtagtcaattgcctgattgcctgactttctagttagctttatggactgttatcgtctgaactgatcctggcaatgaacatctacagacctgaacctgtccgcacgggagagcctatagatattgcacctcctctaaggaattgcctttctgagatcaaaatgtattaggcccttttatttctcatcttgcccatgtttcatatatatgatatttctttatgcacctcattacatgtttagcttcactctgcaccttttttttgaaagggtttactgcaatcctgaatttagaaggatgcaactcatcgtttagacaaatgagattcattgagcactttaaccagatgtttaatctaatctgaatagcaaatatataaatcttttatccaatgtatctaccaagttcaaccgatcagctaagaaagccatcttctttgctcgcattggttactgttacctccttatgcagcctgcgttctggcctgtgtgtaattatttaattaaagggcatgaacccttggtaaccttccattagattacttccatgaagcatcttaaaagaatgacaggaagcatgaaccttccattagattacttccatgaaataagcaggattataatttaaactattctactattttagtaatacagatgtcaagatgcttccagttccctctcaaatcatagcaagttatgccttataatgcaataattgtgcttagcttcctttcaaaagaataatcatgcttagcgaatgatgagaactgccatgtcattgcaagaagtgtgggtacttcaaagttctcaacactcaaccagggatgactaactgtttgacataaaacaaaatcatcaaatgacaggtgttttttaaacatagttataagaaagaccaagtaaggcttcagtttggtgggcagtaatactctttgaaatcataggtttttaacttttactatagctatttaacgtaatgattttggagtaggcatttactgtattttagattttttttatatatagggttcatataaggatatgggcggcaatgcttgtctggacatgagttcctatttagattcactgcatgaaagccgagggttgtttccattgcatcaccatctcctatctttattgccttatttgctttagtagcaccaaattggatacaacctaccataatggacatataacacttctagaagttgtgatccgaagattaaacttcatttctagattcaaatggtatgattttagatttctaggttcttagtattgtgaaatcatctcaagattatcctgacgttaaatggtaataacacatggcaatcttgtgcagggagattgtaacttcatttgttgttgacttcaggg

SEQ ID NO: 14787 - DNA, 3910 bp, Setaria italica
  Intron number 3 from transcript Si007559m (locus Si007555m .g) derived from phytozome v7.0 (chr-ID scaffold_4; pos 19 40863 to 1944772 reverse strand)
caaccccaccggccaggcactcatcatctccacaggtgtgcgctcaaacatctttcttgctcaccgcttggcatgagccgcagctcgaccaacagagtgtgcataatctgactgatttgttttgttggtgatggctgcttgcagttgctgggatggcctacttcatcgccgccgacaagaagattctgtcgctggcgagaaggcactcattcgaggaagcccccgaccacctcaagaacacctcctaccagggcgccggccgcccacacccggctttcttcaggccatgaaacatcttcggaaattgctagcacttcatgccgtcgatgcccgaataaaatattaccattagcttactaatcatcgatgtaatggcgaagtgcttcaatcggtcactgtaattagtttatttgtactactggtgatccagttcaaaaggaatgcaacttgatgttactgatcagctctgaaattccggttcttctctcaaacgctaccaagtattctcaagtttcaatatgatcagccaccgatggctagtacagtagtacttatgcttcaactcgacagtatacggttaccacatgttctcaagtattctctgaaatttgtgagtagcaccattttaaacatgttcacgttattaatcaaactcggatcaactctcagtgaagggaaaaaaggaaattctattccatgccctagctaggctttcgacagtatatggttaccacgcctatatatatacatttcccttctaccctctcacgctcacgcctatacgtaaccttcccttctccccctcttcctactacgctcacgcactacaaaacagaatcatacgtagagacactattttagtcttgtagagacattttatactgtccctacacagttattttccattatgtcatagaggtgccactacaaatagtgtcactttgaataaagagacatttttataagtgtccctatatatatattaagacaacttgtaatggcacaatattatgtctctatattctacgtgactagaaatatattgcaaaaatttgatagtttttggagtgatgggtatttgaactcaagaccaaaaatttggtagtttttggagtgatgggtttttgaactcaagacctcatgctacattgcttaatgctccacctactaggcaactcaacctcatgccaattgttgcatatttacttactataattcttatgtgtatgcttcaatagtctaaatagtatctcaagatattaaaatgaatgtctcaaactatatctttaggggtaaggttaatttttaagtgtttcaaatatgtccttaatattctatattagcattttacaaaaatgacttaagaaaatatttctatagttgaaaaaacctcaagtagtgtctcaatacatatgacactttctaaagtgccataaaaaatgtctctataatatgttaagatatattcattagggcaaattgtaaaatgtatatacaaaagtgtctctacttgagatttatgttgtagtcacttgagatttatgttgtagtgatgtgatgctcacaagagggggggaatcaacaaatggccaagataatgaagtcatttttttggcaaaatattttcaaaaaatagaaaaacattttctcaactggtttgaagataagcagtgcaataatggagagttgtatatgcaccttatgacttactccctctgatcctatttataaggcgtggtacgacacaacatgatctcctaattaaaatttgaccattcatttatcttatcttatattgtttgtggttataaatttataatcattagagagtgcatttaattacaaatccaaccatgttaaagttatattataaaagtaaaaaattattggctaaactattggttaaagattgtaaactttgaatcttgatatgtcgtatgcgccttgtttacaacatgaacggagggagtacgagccttttgaataagagatactatcggttaattaaaacatggaaggtcagattttgataacggaggtaacattttttaatacctcttaggtatcgagattcaagttataatgttttgatgaaccataaaaaggctcatgtaccttattatgcagggacaattaaaaatgttaaacactgatgatgattccggacgtaacaaaaacacaaatttattttcaggttttttacttatggaaattatttgagaaacagtggataaagcccacactcctggtactagtatactccgtaggaagaccagatctgaaaaccctgaaaaccgcagcagagataatctattcgtacaactttttttgtggggcgcacgcctgcagcccacggacggaaacgccataccgcgtctgccgtttctgttgctgatgcctctcgctgaaaactgggagcgccaccctgagtccctgacctgcagattccggggccaaaaaaccgagggcacgcccacacggccacaccacaccgccatcttcagaaaagcacttttggtgcttctacttgcttgttacttctttctgtttcatggagtaagtacaatttacggtttcacagcatagttacatcactgttaaaccttgaaactacaggcacttgccacatgtttaacttgagaccagtgacttgagcttttggtctgcacatgcagcggcgtcaaaggcttgaccctgctgcctgttgacagtacgtcgtggctccagttagtgtgtcaaagtaaccatagttggtaatcttttttgacccttgttgagtagagtagcacatagatgcatgccgaacctagctagagcccacataacaccaatggaccatgggtttctgatctaaaccgacctgctggacacacggtttaggcttattaaaagccattatattaatctaattttcttgaggatccaactcccaaaaggccggttgcttgacaagtaatcgtaccacccacatgctgccatgcaccgcctgtctgcaagctatagtgggtaggaaccgacggcgatgtgtgtcctcaaggctcaagccaaaggttctcgccgtccaaaaccacgtccgctgcgcccgccgcttctcgccggccgtccgccgatcttctgggtcctcaacatccggcgctgcctataaatccatggcctccccccctgcctcttcttgcatcccatctttcccactgccacttactagtcactactcactaccaggcgatcgatctgcttcatttcctagcgctttaagcagactatctttcagagttattctctcagattagtttgcaagcacaagatcgagcaagatcaaagcaagatgtcgactgtgagccgtgcctccctggaccagaagcttgccatggccaagcgctgctcgcgaggtatgcgatacgtgtacgctgtgcaagtgctgcaaacacatacaattaggtgtgtgtgcgtgcgcgcgcgctactgctaaacaagtctgtcttgaaggcatgtacactgactgatgatgcttccatgcctgcagaggcaacccttgcaggaactaaggcagcagctgtggcaaccatcgtctctgcaattccaaccgtgagtctatttccacacgagcaccatcatcataccaatgttttccttataagatggataggaagcatcacactcatcgttctgctgctgctgttcagctggcgagcgtgcggatgctgccatgggcgaaggccaacatcaaccccacgggccaggcactcatcatctccacaggtacgacgcactactgcatctcttacaagctgatcgatctctatcacctcctctgtcactttgaaagatcatcggcctcgctgacctctgaaaacgtgttctgtaacctagtgctgacgatacatgtcttgatcatcctgcagttgctggc

SEQ ID NO: 14788 - DNA, 3130 bp, Setaria italica
  Intron number 3 from transcript Si018283m (locus Si018283m .g) derived from phytozome v7.0 (chr-ID scaffold_1; pos 33 080281 to 33083410 reverse strand)
gggcagaaggttgtcaagaacagcctccatccgaggtatctgcaattttgtaccaatctacatcatatttattgaatttacgtagaagctgtccttcggctctattatacactccaagcatgccatgcctttgctagcaaattagcaagtaatctcagattgttaattttatgtggtggtgatctaataagttgcctcttgatgacaatatatatagaagcaggtccatcgtgttgtagctagttgaggcgatcgattagcagtagatctggtaaatcttacccgagagacagtacgtaagccgatagtgaagcttgctttgtgctagactgctggctagctggtatttcaattgctttcagctcttgtgcctatatataagcaatatatatgacattcagaaatatatagaagtgggaagcatgaaattgttttggcactcaatatgcttgaactcgagttatattttccatttgtttttttacaaaatcatattgcataggaccaatgatctctactaaattgtatttattgcaaggctagatcattaaatggacacaaattatttatgctaattaatgtgtttaatcaactagtagttctttaatttgcaccaatcatatacaatttttttccacaactggtactagtttgtgttctaccgtaccagattttttaactgagtgtacaacgaataaggagtgaaatcattgcaagcatatgttgaagaacagagagtaggaaagataaatgacgcggaattgcatctagcttaggttcacgcttgagttagttctgtgaaccgtacatgtgtggatatacacacacttagacaattgatcagaagttcaatctcgctctcagacgaccatagggtctacaggctacggcaaacagacgcatgcatgaagtgcacatgcacgtacatagacaggtcttagatccttgcttgtgtttcttcagaaatccagatgcacacagataatataacgtgcccataagtatggtacttgactagagatatacctaggtaagagatatatgcactattcgaatcctatcgttttcctgcaaatatacatggtttgaatacaatcttgattattaaaaaacaaaaaaaaatctgtaacaatattagactatattattaatgctacccttaaattgggttttactgtatgtatttaattagatcatcatctaataactcttaaccacaacaagtatttagtcgaccagtaagctatggaagctaagatatcacatttgaagagtgctattattttttgtaaattatatgagaagtatgtatgatcagttgacagaagaaaatgtagcgactcatttaacgaccaaataatttaccctctggaagctaaggtaaatcacatatacgttgggggacagttagtcaataaacgatctgtcctgctaggtgaccacagtaattaaacagtgtattaataattggagaatctttgcagaaaaaaagttatttgaatttgatatatttctcttttatgaaaaaattgtgaatctaagatgactttgatatgaaacatacatgtaagtatagatgattataaacattaaattcagtaaatctttacaaacatgctaaaatatggatgattcagcctgaacccggcctgaagggaaaagctaaatcttgtcaacgaactgcgatcatgcataggcgatatagtactcactaagttagagagcattgattacattgttgcaaatagaaaggtgcaaactacaagtttcactgaatgttaatgagagtgtcttcaataatggtggactcaaccacaccctattatatataaaaacttacacatcttctaaagatagcataatactccgtctatttcaaaatgcatagaattccttcgctaaactttgattacacgaaaagttatgactatgtaagttagatattataatattcaacatgaaaagtgatctctaaataattaattatttttcttataattttagtagaattattggtcaaagtctcaacttgtagacacatttgatgtcctcaggagcacttactttgaatcggagagagtaactaatatcttatacttcatccaatataaggatttaattctgagtttgtcctaagtgaaggtattctaagtttgactaagattacagattaataatatttattatgattgtcggatttagtgaccgtcagtccatctaggggtacccagatggttgatctgtaggcagagaagatctcaagaccatgaacttaatggtaacgcaagacaaaagacgcatagatttatacaggttcgggctaccagtgtagcgtaataccctatgtcctatgttgggagtattgtattgcgtcctgtgctcaggtgttggttgttgtgttgagggattgaatgtcctcctagggcccctacctccccttatatactctgaggggtagggttatatggcaagtcccctagtcggttaatgtagatgagatctagtcggattacaacacgtggggaggtctagtcggactctatcttctgccttcttcatcaagtcgagccggcccattagtgggcggctgggccctcatgagagtaccaggtatccataactgtcaatgatataaaatgagcatcatcatatctgttatgaaaaatgttttcatttttaccttttggtgtggtagatctgtagatgttaatatcttctctttttttcgaacaatttaataccttctctatgaacttgcattgatcgatttagataatccgagttaggagaaactcagaaattcttatatttggacggagggagcatatatatatatatatatcacattatctaaatatataatatgtgtccatatatttattaatcagtgcatacatgtgggagttgtaagtagattgcctattagctatagtagccttaacttttcgatgccacacgaacaaaatgctgacataaacaactttgtatcgctgatttgtcgaacacgccccatgtatgatgtgtgtgatgtatatcgttttaatttagctgattattgactccgcctggttgcgcgcgtgcattccttcgatcaggagctatttccggtgcacccacagcaactgccgcg

SEQ ID NO: 14789 - DNA, 761 bp, Setaria italica
  Intron number 10 from transcript Si028787m (locus Si028787 m.g) derived from phytozome v7.0 (chr-ID scaffold_2; pos 1 8227503 to 18228263)
gcattactaaaagcatcggtgacattgaaaaaaaggtatttgtgacttctgcctctccaaactaggtcgttgatgtgcaatgtgcccagagtgtggctaattcatttgtgtcttgtaatgatccccaaatgtgctacaagagaaccaggtcttttgcatgatgaattttcatctcttgaaacaccacctcaacaatcaataattcatgtcctggatctttaataccaattaactcatgtcctgggtctttaataccaacttaatgtgtgatcggaagtacactaaatccatgcgtattgcctctttcctcttctcagtagttgacacaccattactcctctctttaataccaatttccccatctactggatttaagggagtctataacatcggtcaacttttcttagttttattaattattttctgtagtttttattgaaaattgcatattctgcggaagtatatctgagtcattctttgatagttttgtttataactttaaacatgtatgctcttatctttctaagcttaaatgagatttgactttttagtttctttcgtttgaccatgcatcttcactatttttcttgaacccattactggcaagtcccttctccagcatataaagttagccagtgctgctatggttatgagttgtcatgcctctctttatctttggatcttctgggtcttgtactgtatattccattaaatgtttctttgcagatagctgaagacgcccgcaagatcaatcacctgaa

SEQ ID NO: 14790 - DNA, 1110 bp, Setaria italica
  Intron number 24 from transcript Si016161m (locus Si016161 m.g) derived from phytozome v7.0 (chr-ID scaffold_1; pos 6 259712 to 6260821)
ttgccgataagatttctgtaagaccacaactcatttgtgcttgaaaaaatatatacgaattagggacatgtccctagtttatcaatgtgagaacatgttttagggcattttgattcatcattctcagatgtaaatattctgtgcatgttgtcttgccttaccttgttgtctgtttcggttgaacaaaaaagtaccggacctattgttgatatatttgatatcatgttgcgtagttttattggagtcatttgccttggcattcatagttatgcatattactaatatgtattttatactatgcaacatattagtttgggttgattgcatttatctcatcgactcatccacaactttctaaacttcgaaatcagattcaaggatatttgagtggggtgttggtctcattgcaaatcttgcttcttgtggttgacattgtttctctagttttgctgctaatatccctgttcctaacttctgatgcataggtagatatcctatgttctgtagttgtgttacgatatctcatgtgcgactgttaatggtagataaaaatatgaaaatttgaaacaactgaatctgtgttccagtaaccagtaagatacaaaactttgtcctctgttatggacacttccttcggaaatcagttcatgcgcaggaagatgaaggcccaggcgtccactagtggttagataagtttgttgagtaagtttttctattcaatctgttagtagctggattggccagcaagttagggataagttgttaggaggttgagagtcctatatgtactgcctgatggcgatctttagagattaagcagaaagatcattctaatctcagagcctcccaaggggagggcgagttagttgtggtttacctgctgtagcccttatatcaataaataggccgtatcatcctcttttggttatcctctagctttctagctgaatttgttgaggcatttctgactttttgtttcatcatgtaagtacaacaggtatccttgtttggtccttggagtacatatcttatattgttcaatgtgtgctcttgctgttgacttgactgttctactgaaactaaccatatttcaacaatacattgcaggtg

SEQ ID NO: 14791 - DNA, 3031 bp, Setaria italica
  Intron number 1 from transcript Si039077m (locus Si039077m .g) derived from phytozome v7.0 (chr-ID scaffold_9; pos 67 69025 to 6772055)
agttcgtcctcgctgcaacactggatagcaccttggtgagttgtttgaagttgattgctccttctaaatgtttccatttttcagttgtcttgctgttccagttccagcttgctgcatatgtggaaaactgaaattggtactttgttgttatgatggggctatatgattctccaacgcacagcaagattgtaaaacttgagcatcagtggttgtcatagcaataaaccataagaggggaggtttagtgcagttcgtgtggcatgttctaaaggatcattggtggctagttatgtagagtgcccctgtcggtgctgacttgcctgggtcaggatgatattgtcataagctttctgtttgctatcatagtaaggcttgctccccagataattttaaccatatcttgcttccatgaggataaagttctgttctgtttatatattgtcctgttatgttacatatagcatgggagtgtgttcgctacttcgggagcctccgggggtgcctctgaggcagtccaaccttatttgggtgtcgttggagggtatgctgcttcattgatccctgaggcaaccccatgatcctatttagacagaaaatttcgatatatggttattgattccgacaaagtcattattgtggcaggagttagcagacacccatattagtatcttacagccactctatgcttgcagcaatctactaaagtgagattctgcagtactgtacatgtacacgatctgcatatcgtggctcctaatagtttgaaactccgtgcttgtgtctgtgtaccatcttgcgccatcctgagatcatggatggaattacctttactttttttgtgtgtgtttgtctacacttggctacctggaaaatatcagctgttctgttctgtaatgctgaagttcattttgctgtcatgacctatttgttacattagtagaagttctttactgaagcgcatgctgtattttgatagaaccttggttgtttcacattaacaaggtggcaacattgggcaatcaatcaatattttatttattttggttgagtgtggttatcgacctggttattggggagaaggaggaggatgagtccactggcagctagggcaaaagccccgatatttggcgggctgggggcagtggggactggggggtggcatggaattttaattcttacgtctcctctcattatatggagataatagatctccaagcaatcttaatatattggaccttttagattctttcttaataaaagataacgtgctgaccaagttattggggccagctgaggcgtggacattggacaatggtgggttcccttgagttaagctgcagcctgggctgggctttaggtccacaacagcatgcaattttgatttttgcaatcacaaaaatgatgcgactgaatttggtatgttttgcgcatggtccagtgaggcagtgacttttgtcttttagaattagcgacagttgcttaatgttttgcacatgattggcatgatttaggtaatcaaattatgttattccagaaactgattcttactatatatgcttatgcattcttaaaatgttagtgtattttaatcccatatttccattagtccagagcatgaattggtcatgtatgaagttgtttttgaggtgttgactaggtggtaaggtgtacctaggttgcctcagggcaacgcgtcgccctccacttggggcacatacctgctctggcttgatcctgacgtcgcaccacccttctcagactcaataccactgacacatacccttctctggcttgataccacagtttttcactcttcctatttagttctgaccttgcccactcctgtacagcctgattcctgtgtcttccattcctgtccaacaacttggggaggcggaatggagtgctgcacaggattgctgctatggatgggagcatctggagggcacatgagttgactgttgctagggagggagggaggggtgggaggtgcttatgggattttaggattgggactgggctttagtggctagtgggatgtgcctggtagtggtaatggtccatgtatattcctaccgtcccttgtttatcttatacatgtgtgtacggtgttgctttgtcttgcgtcttaggtgcttaggtggtataggaagggggtgggttgcctcgctttgccttccccttaatgatcatgcatgaagccaaagatgctgatgttaaatgcagcaattaaacatatatctaccttgcttgaagcatattaaccataggcttgatcatagtaattttttttaagaggccacaaaagcaagggatcttacttccgccattagaagtagcgcatggaccaactaggcatagagcgccatggagttgccactggtttctctatatcggggttatagatgcccacagcgattcacacatggcagtctgcagtgacatctagggttaggagttaggtgccaaaatggatggaaaacaaggaattaaaattgtcacctcttaacatttttgtaagacactacatccagatgccatttatgaatgacattatgcagtgaagaccttgactcatgtcaccattctcagggaccaactatttctgttttatttgctcaatttacttggagaattgctgaaatttacagtccatgctattatcttttgccccaggcactaggtgtctattctgcactgtttatcttttagactattccatgtgcatttagaatcatatttgatatttttgatgttacttcagctcattttcaatccattgactcatcttttaataggctttttgcttccaaatgattatatcttatgtactgtaggtatgctcataggtgtgaatgcacccaacgctatatgcaaccatctgttaaaatgaacatctaccaattttatttccacaagtgtacagcattctacttcaaagaatcaacaacagcttatgagaagacatctgctcatgcattgtttattttatgcagaggctctggaatttctcagctggaaagtttctgaa

SEQ ID NO: 14792 - DNA, 1470 bp, Setaria italica
  Intron number 2 from transcript Si031349m (locus Si031349m .g) derived from phytozome v7.0 (chr-ID scaffold_2; pos 44 903341 to 44904810 reverse strand)
acggcttcatcgtcatcaagggccgcccctgcaaggtatatatgcgcttcgatctgggttcgagtactctagtcctgcgattatatctagatgcgcgtggttgtgtggttgaactggctgaagtggtatcctgtcatactatatgatgtcttgatggggataaatgctgttactgttatctctggacggttgacccttgtctctggggatggaatttgtggattggatgctagataactgatgattattcagatggtgggcatcatgtctggggattgaatttgtagatttggatgctagatatttgatgattagtgattgcttagaggaaggtggaaatcatggttgatgagaaacacgatgcacgtgtgaagggtgccatctggagttagtatgttctgttgaatcttctttgcagagctgcagtttgttatggttaaatttggtttgcttcagtgggggatggtctgtagattgcacccagttcaaattagtagttgaatccgtagagaaaaatggatgttatttttccccttattaaggggaaatctagtttgacatgtacagtgactaactcttggcaaaagctagccaaatataatgtacatgggaactcattctttacacttggttgtcagcaggtctgtaccctcaacagcaattgaggcagtttgccctcaccaataagtttgattttgatcatctatacagtaatctagacaaacgggaagttacttcatgcacagcctgtttgtttaagtccattacaaagagtagcttttggcccatttgtcacccgagtgataaccacgccttgtcctagacaactatgcttgctcagaatatgcttatcattttggtagtcaatctgggcatagtggtaaacatgacttattaaggagtttattcatgagtttgaaaagttagcttggaacaaaaggtaacttgcattcattcctacttctcattggacaggggtggatttgcctccacattggatatatgacattgcactttgtgattaaaatgtttgcaatgagtaggatggagatcttatacttacaattctataattttcttttggagatctatacctgtgttagaatggacaaattgcctcgtacagatatacctgatccatttggtgacaagtctaaagctgccaaagcttttcccagtctagttagcttgttgtacactattttagtggttcactgcattcttataaggtgatgataaaatccatgtccttctatgttccctactgtctttttttatattatcgagtctttgatgggttcagtgatatcagcaatgcaatgatgaagttgtccaaaactatttggcatttcccatgctcttaagtagcatcatagttttgtcgggattttgtttcatttatcaaacatggttgataaataaagttatgctgcaggtggtggaggtttctacctcaaagaccggtaagca

SEQ ID NO: 14793 - DNA, 2571 bp, Setaria italica
  Intron number 1 from transcript Si025651m (locus Si025651m .g) derived from phytozome v7.0 (chr-ID scaffold_3; pos 83 49780 to 8352350 reverse strand)
ttggagcagcgacacgaggcgacgatttgttccaggtgcaagtgcaaatccccctacccttccgtccgcttgtaccttctatgattcaaataggtgtgcatctcttctgagccgattattatgtatcgatttcacagcggatcccgctttatatcatggaacaaactacgaatcgtgttcatttttttttctgtcgactactctagggtttcttcccattagcgcagttatatcttactggctttttgtcacaccagaacacccctctgatgtttaggttgataatctgggcagcttattacatacattagccacatcgtttgtcaggcatctgttgcatttggattatttgttaacttgtattgagttgaccagcattcttatcagtttttaacattgttggtgcatgatttatgtgtcaaatgcgctaagcaaaaacaggcattaataacttgaagttacaatcatttttgttgtttgtgctaggtactagcccctttttgaacgaaaacattatcatgatgattatttgtattagttagttctaattaggtagcttgacaactagctaggtgccttttttaactcagaattcacggtgcttataattttacccctttaaccattgatgaaactatactaactttttttatatgtgcatcaccttttctatttcatattagcaggtcaatttttttatgttttatctgagaaatgaagttgtttggtgccttttattattagaaaagtacggtgacatatctgatccacaccataaaacagagtaacttatgcgtttaaatagagaagtacacttgtgtatgatattacacataagaagtaactaatttgctgatttacatgagatatgaagtaaaccgcccctgaatttgaacacctagaaagtaactagtcctatatttgtattagataggaagtaacttgctctagcttcagtcacataagaagtaactagttatttatttagaggagataagatgttacctccccctttattctgctatgttgatactgttagcttttgtgagcaatttcaacccctgcttcatctatttagcaaatttcattgtgcgacattgtttttacatgaaaaaaaatagtttgcctccttaatagtgttgtgtcagtgatgtacaaagtaactccgtgcctaattttaaacacatagcaagtaacaccattatcttagtgatacacccattatcccatcattattttatatgagattgaaagtaattaatcacggatccacatgatgaaataaagtaacttgtgagtttaaatagggaatgaacttgtatatgattttacttttttccaaccttctgcaggtgtagctaaggcagcgtccctacacattggggtggaagcgtttctcttgatatctagtgtaggcacatattgatcagttatgttccaaacatatacctcccagctatgtgcatggcaatttgtaaaatattttatcggtttgaatcacatgtgtatgactaactcctatctgaactagatgaaagcaagcttttgtagagatcgttaggaattacacgaagcccaacatctttgtgtgttaattgcatagtgcaatcatattaggctggtagctggtccgtcttgcttttattattttatattctggtttgcattatcaggatagacccaaagttgtcttgcttttcaaatttccatttgggacaatgtgatgccctccatgactaatcttattcataaacacctgctgttctcatgactgtgggcctgtggcttgttctctctgatggccagcctatttgcaattttcctttcatccttatttgtcctgctttgatgttacctccgatttgcattcctttttatgagggatggtaaacaaaagctattttgtcgtacttattgtcacttgaatctttttttatcccttgctacatgagcaaaatccgtatgaattgtgggcatcctctcgttctgtctggtaggcagattacatcttttttagtgttttgtccttggcctgtcgtgttgtttgctggagcttttttatgtgcctactactagttgaacatagagtggtttttagtttctgtggggtggtaatccgctgaacgaagtcacttttaaatgtttcctgccttgatatgcggtgtctcttgaagcatatgatatgctgtatgtctattgaagcaatgaacgaagtcagcggtgcctcttgaagcacaacatgatatgtgttatgtctcttatctagggaagttacttatcgttcatttgcatgatgtacatagtaacttatccctgttttgatatgtgtaggaagtaacttatacaaaattcatatgataaaaagctaactttgtcattaacatacctgattttgaactcagtagagagtaacttaatcatacgactatattagacatattgtaacttgttcccggtttgaaaaatataggtagtatctaatcaatcaattatatgagattggaagtaactttgcccatgttttgaaacatgacagggtggtcaactttgtgactattttcacattacaaa

SEQ ID NO: 14794 - DNA, 1400 bp, Setaria italica
  Intron number 2 from transcript Si033276m (locus Si033276m .g) derived from phytozome v7.0 (chr-ID scaffold_2; pos 39 345740 to 39347139 reverse strand)
gttcaagttcaaaggtagagctcaacatatttccattcttagtttcttacaaatctatatttcaagcatttggttatagaattatggaaacaggtagaataagatacggggcaaagcataagaagctaattttggatgaaatgagtacatcggatgaacttggggatggaaaccatgcccaagactttgaattcttctctgttagatttgaggatatcgtggctgcaacacgcaatttctcagaggcatgtaagattgggcaggggggttttggtaaagtttataaggtaattacttaattctgcggtgatttcctcttattagttctggtcatctaattatattgatttttgttaattgtaataatgagctccaagcctcaaatctgactttcacccttatactttttctgaaggcgatgctaggtggtaaagaagttgccatcaaaaggttaagcaaggattctgagcaaggaacaaaagaattcaggaatgaagtaattctaattgctaaattgcaacatagaaatttggttcgactttttggttgcagtgttgaggctgatgagaaaatccttatttatgaatacttggctaatggaagcttagatgctaccctctttggtatgtgacacgccataaattcttataaatagcacataaaagctaaaaattgtgttatacagaatctcttcatgcagataattcgaggaagatattattggattggcctacacgattcaatataatcaaaggggttgcaagaggacttctctatctccaccaagattcaagattgaccataattcatagagatctcaaagctgctaatgttttgctagatgcagatatgagaccaaagatagcagactttggcatggcaaggatattcaatgatagccagaaagatgcaaacacgcatcgtattgttgggacatagtaagtaacaatttatatttttccaaacaaaaagtaactaaattcagctttcattcaatagtatgtgcatgtgaaatgatcaaacagtggctacatggctccggagtatgcaatggaaggcgtcttctccatcaagtccgatgtctatagctttggtgttctactcttagagattgttactggtataaagagaagttctgttagtagcattataggttctccgaacctaatagtctatgtgagtatatgccttttatggagctgtaactgattaaaatcagagtcttcatgttctcgcttaccataaatccaaataattgttttgattgtttcaggcttggaacatgtggaaggaggggaagacgagagatttagcagaccaatccattacggatgcttgtttgctagatgaagtttcgctttgcagtcatgtggcactcttgtgcgttcaagaaaacccag

SEQ ID NO: 14795 - DNA, 2571 bp, Setaria italica
  Intron number 1 from transcript Si002183m (locus Si002183m .g) derived from phytozome v7.0 (chr-ID scaffold_5; pos 41 600241 to 41602811 reverse strand)
acaacgtctccctcggaggcgatttcagcatccaggttagtcgaggccctccacgattctttgagatttaatccgtttgtctctcgtgggctcggttagttcgactgatgcgtagatcgcagcttgttccgtgggctcggccacaacttgtttgtttgtgtgctaagatagctgcttagagtttaggggattttttcttgggcattgctgtttggaacccgtcgattgctttccagtaaatgattctaggttaaaagtgccgatatatactttagtaagatggatttgttaacaaggaagagaattacttgaagtagagagattagcagggtttagtttaggacgaaaataaaattgtctaggcaatgcatcatcccagttatttgaaggaatgcttgttgttgaatcgggttgttgctagtggtagtgccatgtaaggtctgctcagaattgtatagactttctccttgaacatgtatgatatgatcctattccagccgtgaagatacttagttatgcctttgggtttatgatcatgatttgagctttgatggatgcagaagggggtgcagagggaccatcagtacttatgtcttcaactagcatagaaccgcgctgagatttgcatgattccctgcaggcgatttgatataggattgtacttgttttggattgctacaaaagtttagatgtagtcatttcttgcaagttacagatcacacgttgcatttgaataatcaactaggaacaaagaagtaacatgatcttgtatcagcgatagcaaaagtcttcacgacagttggtgccattttattttacgtactcggccttcacgaatgcatgtgcatgcatgctatagtaacgtcttctacttccgttatactgtccaaatttatgtgattggtgtacatattcaagagtttttccgtagcttgacttttgtcgtgtactgaattgctgacgctaagaatagctccagttttattacctttgacggtgattgttctttaattcaggtattcgatgttttgtcattgaatttttaattaggaatacgagggagttgataacggtattaaggttagcagcgttgaggttttaaatgctacttctaaatttaatctgatctacaaacaattctggaaagaaaacttgatggacgtatgcactttgaagagtttcactagtgacaagtcattaaattccagatgattgtacagccatcattgttatccggacacactgagttggatatcactcacccgtgtcagattccaagccccccccccccaccccaccccaccccaccccacccccaaaaattgccaaatttgacactttcacccgagtttgacaccaacagccgcacccgagtcggacagcagtacagcacccacacctgtgtccatgtaacaatggcatccattatttttgttcgatggggatatatgagatctcgtacatatttttggtttgaatctattgtaaatccaaatatgggtataagtgattcaagtaaatatattacaaattgtgtaatgacactgaaggagtgaaatatgttgtacgccaaatatgactagtaaaggcagtaacgcttgcacttgtcgaataggttggtttaggctttcgctgagccaatagcacaagctgattaaccttttgatggccagtgccttcgctacgatcctactctgcaagagctatgctgtgactgcaattagaaacaaataatcatggaaggggaaaaggatggttccctagataaaccgcatacctgtcactcaggatacgatgaatcctgaaatttaagcaaatagtgaacagacctttgttttgcatgttgctgatattcggatgttttatgcgcttttattttgtgtgcatgatttatcatttttttatgacgacagtagtttgctgtgtatatgcttcagtgctgttctggtattacttcacaatatggaggtattacaattatttgagcttttctccttcaggatgtattggagaagggtcacctaacatatgcagcaattagccttttccccttccactgcacactatattcatctttgcattatagttgtagtttatctttggccgataaactacaatagtttaccattgcacgctatgttcctgtatggtacttgagagttcacactagacccgaatttggacagatggcacaagttatgtgtttaaatattggaatttgtgattcttcactttgtttattctcagcctttataccgcatttgttatgaacaattgtttttcttgcaatgaacctggaatgctgttatgcagtctattgcttctatttgtttccatgtgtattgttcatttgttcaattaaatataatgtagccagacatgataccggtggcctgattattagattaatatatagctattctttattctagcactgtaactttatgttaatagaaaaatacaagttttaggtctgttcttgttttagcaatgcgcactcatgaccatattctgaccttatgctttcttctaataggttttgcagaaggccctggaggtttgggacctcca

SEQ ID NO: 14796 - DNA, 2939 bp, Setaria italica
  Intron number 1 from transcript Si000247m (locus Si000247m .g) derived from phytozome v7.0 (chr-ID scaffold_5; pos 14 860942 to 14863880 reverse strand)
caggtgagggcctggctccctacttcttggctgctctgtggagcttcacgacaggcagatccgcctgtggctgttcgataggctagcgcccagcgtccgtcgcatgtggcgatttccgtttgtttgggcgcggtgggttctggaagggagctgtcgggaattccgcatggaaacggtggggagtttctgggggccagccgtgcccttagatccgagctggctgctctgggagctggcaattcggtgtttcgagggggattgggtatgcttacttcttggcgaactgtagtaatgagcgcggtatcagaaaatttgttctcttgttgatgaggaataggtggttaggggtttttgttttttgcgcaacccgtaccggcagttgcaggtttggagctggcgtgacatgcttagctgcggctagtccagatcgcctagtttctgactttctgtcagtgaacttattggtgatagccgcaaagcgagccgtttggacatgcgtattagccttgtctgtagcacgatgagtttgtatatttaaacaaaaagaaatgtgcctttagagtgatgtaatcactgcctatatcattatgtcaacatggagcttacatgtttgagttatatttatacaaatgccatatctataagctgctactctttgggctatttctgtgctggtagtagtatccttctattttggagactgttgagtccgcccaactgaatttcataacaaccaaaagttccagcttaggtagatacgttcataaactgatcatctaggagcataatcttcttccgtgtaaatttattgtggcatttgattatgtgtaccggtgtgattttgttcctctgaagccaaatatcccagcttcaatgagtgtctaattcattgaagaaaaatcgactgtgcacgcgctgcactcctgaaaaggcagaacattgcagcatgcaatttggttggctgacccagtgtttcaaagacatcgcctaggcgtccgcgcggacccagttcgccttggggaacagttattgtcacctaggctataaggcgtacacatctcaccttgggtcgccttgtcacttttgaaacactgggttgacctaaaagaaagattataacagggactctagatgctcccttgaggggttggtgtgtatatcaggacacattgtccaaaataacctgtgatacctgccagctgatctatgctcatatttatatctgtagttataccgcgcaatccaagttttggtcaattcactattaaacaaacactggtactcatgatttgttagtcatcattcccattgactagagcagatgtgatgaatgttgtagctgaacttttgttgtggataaggatgcccctgcagcagcatgccataaggtcgagctgcggcagaggtacgatgtaccaatgatagcgaggtgtgccagtagctgggaacattgtgggagaatgcagagggcagagtgccagtatggcagaggcggaagtaccaggtggcagtctaaccacatcaacttaatatcgacaggattagatcaaatccttgttttaggaatttgaatttgagtcctgactgagtgactgtgttagcaggtccatctgttaagagtctgaacagatcaaaagttaaggtttgacttgtgttaaccggcagcctttgtaggggcatctctatagaggaggtcaacacggataatgtattgttgaagcattcttatccctctacttctctcatcccaagctatatccgtctgtcttatcagaaaccccaacccgattcgccatgcctttttgtgcaacttctctgtgatagttaatccaatgcaaaccaaagttcgtaacaagtctggcccattttacatgtctatggatcaggtgcttctttgaaatattctgggaaaatggacatggactttgtatgaatatagaagtaggctaacaagaaaagttccttttgcgctggtcgtagttcttttagcagctgagattgatataactggtatcccaacaaatcgtcaatgttgggaatagagcagtggcatatagctggcccctaataatgggctttgtttccctttcagtcacatataagtaaagagtaagtgaatatgtatgagtcaactcataggtttagtaggtctcccctttctttgtaaaatgggcaagacatcagtacatcactatgaggtgtagttactgcggtagtcgagttatgacttcccctttgaccgctgagaaactactactattttttgttcatctacgggaaagattcttgatttcatagtaacaagtgagtagggcccagagaatgttcatgaactttctcatcaaattgatggattaaatttaagataggacttgtctattagagatacctaaactgcaggcgttgatctatgagtaggaaatgttgcgctggtatcgacattctacaggactatagttgtcaagaggcgctacaagaatgttgcaattcatatgagagtagctctgccgagtgcatacaagaacagcaagaggagctcctgtgtcaagcacattttagtcctgattggtttggtaattgatgccaaatcatcataatttctgggataaacatatcttatagattgaattgaacactacattgaagtagaaaaatgtaatttgttacttagtttacgcagaagtaatataatgattactattatcctggttttaaactttttggtcgcatggttttattttacctttattttcttattgagcagtgcaagtccattttagtttccgaatttgaccagtacgctcattcatgcttgtatctattaagaaacttatttgtctcatgtctattttgtatactatttattcctttactctgtactacaactgatggttacaatatctaactgtttcagcgtgtcaaagtataccgtttggctg

SEQ ID NO: 14797 - DNA, 2469 bp, Setaria italica
  Intron number 2 from transcript Si004566m (locus Si004566m .g) derived from phytozome v7.0 (chr-ID scaffold_5; pos 45 968515 to 45970983 reverse strand)
gggaacgctctaattcctccgcagcttcgtggaaggttagtcatttttccccttttcctatctctttggtgtcatgcgggaccaatcttattctgtgtttttctcgcccctcatgtccacaataaaatgctttcagtgaactaaagcatatgggcccagtcccagagtgtttttttttgccaattattcacattatatattttctatccctaagcaatgcttattttttggttactgcttcacaggagcaacgttgttactgaagatatgagcaaactgtttgtggctaaacgaaaagagtagcatattttaacactctgcaaacctgaacctctgtttggatttcatcggcacatgtactggtccccatagccccatggatgcgtgggcatgatccaaggatgttgcttaatcctagagaagaagttgctaatggtactgcaacctagattcccagaccacagtgggttgttgtcagattcggacgatcggttggtgctagtgctcacttgcatctgcggcgcaacgatgctacatgcctgatgttggatgcatgtaactctgttatgacaaactagatgctgtcaccctggtaggagttaggactagatgcaactcttggtgagattgtgtattctgccctgttccagtgcccggttagccttgttttgaaacatgcgtgcattatccactgtgctctagtttgggttttgagatcactgagtacttgagttgataaagcttttatgcgaggaaggaatgttgcaaactagttctcttaagattatgttagcaaacggtgctctaccatcgttctcccgcaccattcactcagactgggaatttagcaatgtcagggagagaatttgtttcacaacgatcttggccgtattcgttaattttcatagatggaaagagtcgtatccacgagcaatttcaactttactaaatttattttcgccgagcgcgtgaaatttgtttttcccacaaaaaaaaggtattttcgcgctctcgccgaaaaaatgggtccgaaaatttccatcaaattcatttcttccctccagaaagacgagcgggagggaagaagaggcggcgcggttttggcttcccgagcacgcttctcccgcggcgcttgctttggaacgcgcgcctccctggcgcagcgcactcatcatctaccccccattcctcgcattaccaatccaccgcatcgaaccccgaatcgctcgctcccttgctcgctttatcaatggctgattagtgccgaagcgaagacgcgacaccattcaactccggccttactccggcctcccctccaaggctcgaacgaaggtagaatcccttcgtttccccgcaatatttttcgcggattttttgctagtattttgatcgcgttctccgccgccgccgccgccgaatcgttcgtcccttgccgcgtgcgtgggggattttgatcgaaccctctgattgtgccttctggattgctccacctccaccccaactcctttcccactctccgtggtccgtgcactccaccctatcccctacttccaagttccagccctgaactcaatcccctcccccgtttacacggaaccggccggcgtttgatatgattcctcttatcggcgattgctgtgtgatgagcgcaacgtgcgtgagattgtcatgcagacacttttatgaagctagtacttgtgattgcttcaacaagatcgtagtcgctatcactacttgtgcttcaatcttcagacataagattactctgtgtagttgttattgatgctgttatgaagtactgcgtcattactgatttataggatgatcaaggtgttgcgttcttcaatgtcctttaggattcaccactagatgctgttttgttatctaaactctgtggttctgatgtctaatattttttttacctggcaacaactgattactgtgttgcggttgcacagtcaagtcttggcaaagcttttagctgtctggattccattttttcagaaacaacacaaatatggatacacgttgttttattaacactatctgctctgaatcccagcatttcaaccccttcctactgcctaccacattaaagtttgcagccaccactacttatcttgaaactctgcttgcagttggctgtgttgccatatttctccatactcctggacaggacaatatgtgtcatttatctttcttgtaatcagaaattttctgtgggtgtgaatatctgcagttgaatacttttgcagcttgaaagtgtttctttcattcatgcagttttggtttatgcatcactcaaccatttgagtttgataatattttcagcactcagtatcatgtccagattttgttaacaattggatagtcagatcacgatttgtctggtgttggtaactctattcaccattttgattttgtaggttctgcttgcctatctatgttatccattacagcttgggtaca

SEQ ID NO: 14798 - DNA, 1277 bp, Setaria italica
  Intron number 1 from transcript Si039248m (locus Si039248m .g) derived from phytozome v7.0 (chr-ID scaffold_9; pos 52 540895 to 52542171 reverse strand)
actcgtcccacccctactcctcgcaccccaaggaggtaagccccgcccgacttgccatccactgcgtgtgttctggttgctgcacacgcttgagccgttgatctgtgtcagcgtccgttctgggcgaacgtttccgctgtattcgagggttacagcaattgttctggggggattcgcgtcatttttctgttccagtgcaatggggtagcgaggaatcgaaaaatgaaggttcagaaaacacgacgagcagggatttgacctgtttatttcgaaccacataaattctggtgaagattttttttctttctgcagtaggcgtagtaggtttatattatttgtatcggaaagttcggctgatgtgtgttaaagtataaatagatttggggcaaattttaggaaacattaggtgagagtacaggataaaaggtatcatgtgtaacaatgggagttattgacaataggagtgacacgtaggtgattccataggaggatgtgaatcctgaagctaacattagaattggtgaaatattttgtagtcttttaaattggggcaaaaaagtggaaattagcatacaccgagtggtggcagttttgaaatactgaaaaccgccctggcctaattttaactggtaagctcaacactggcttatatgggatgagtaatgatgttgagcccaagttaaggttgaactaagattgttggctctttacagctttattgaaaagaaagcactgtaacattaaacataagaatagttttagcttgagctttttttgataggtgacatcattcactcaagggacaaattcttaagtattgggaattgaattagtaggtggtagtcattttgcctggtttggttggttgagaaaatgggatagtggtcactgttcatactttaaaagtagatggtcatttatgtgattttcctttgcattgttttgtttgttggatttacaaaatcgttcatgttttaagttttaactcgtatggtgttaggatgaaacatgaagaatctacatacatcggtacatgttggatgtttttgcctcaaatgctggattctataattcagaagttttatgacattggacatgatcttcttgcatggtctaagaaatgcattgcaggacctattcttttctaccatctgtgttcattttaagttatgtccgcaaagttaaatatgaagttgttccacaaatataaatgccctttaaaacattttgtctcttctacagtggcctcctttggtggaaattgctgaaactcgtca

SEQ ID NO: 14799 - DNA, 1905 bp, Setaria italica
  Intron number 1 from transcript Si015440m (locus Si015440m .g) derived from phytozome v7.0 (chr-ID scaffold_6; pos 19 881324 to 19883228 reverse strand)
ctcttgcggtctcctcatcctgggcttcatcaaaggtgccatgctgctctgctgtcttgcctcatttttggtgcacttccttttgttctcactctctctgatgaggccaatcgacgcattttagtttgattggtgataaaatgggagggctatgagcccaaccctcgtgcaatttctgactttaagaggttgcttctcttgatattatgttctgctcttacatggctgctcgattcggaatttcctatcctttctttaggactttggaccagtgcaaataattggtgcgctgtcctaattttagttaggctctgctttgacttggcttggatcatctctctccatagggcaaaaaaaatgaagtaattgctgtaacgatttaatgcctacttctgatttgaagttatgggattgggtttggttagaactatagccttttttggaggctaatctgaacatgtcccttttcctgaatttatggaatttgctgaaacctacttatcagtacaatgtcttgggtcccttggctaattttttatgaatgaaaactcagttacttactcatctgtgggagccagaattataagtagctgtggtcgataaaaaagtatataattttgcagatgaatgatggaatggcacaaaaattttaatatatgtatattctgaaaaatgcaatgttctatatatgatatgcaatcctcattctgctgttatggttttttctttttatctttaaactctgatatgaatcgcatttcattttttttgtctgccaagtgttctgctgtgcccttgggcatgccttattatggcaattgggttatctgcatttattgtggcttatggcctatgcatctgatttggacatactactgcattatcaggtacagtgtgcatgttctgcagtcctatttttggcaacttcattaaattgctagccaaaagtgctcacatttttgcgtcctctttttctttagtcagaactaagctggtgggatctgtcgtaaagtttctgcttcttattgctgctactgcaatcttaatcatatggctgataattggcatcccgggaagtgtatttgctggattagtatatggttttctagcacccataatggcaacatttggagcagttggagaaggcaaagaaaagccattcattcattgttttgtggtaggttttttcttttagtgatcagttttatttctttgtatgtttatctctgtgttggtttagtcgcatttctcttagccattgctcgctattctcaactgcaggatggagtactatcactggaacatggagtactatcactggaagttgtacagtagtcagggatgtgaaagacttgctttttcactcctatttttcaattatggatgatctgcatctgcagaagcctcctgatggaaagccatatgagataaggtctctttcctgttcctgtttattatcttttaactttatacacctcaagactagacttttgttgttatttttccccttttatccttcaagcatacgctgttcagcttaataaatacagggcatgttgtataaaccaatttcaaatctacagttgacggggctaatcaagatcaagtgcttccaagattcatccacaaggccacaccagctagattgatgtgccgagttcgctcctcacgtaatttccgtcaacgtgtgggtgcaatagatgctatcaacgaatggagattgcccaaagtcggcgaaggggacgacgagtgaggtgatcaaaaggactggcagaatgagcccgtgtcatctcgtatatcctcaggtattggcctgaatctcatggggttaatcagatcttcagcataatctgaactttgagacaatcatgtatgttgcagctcgtgattggaattttgattctg

SEQ ID NO: 14800 - DNA, 2508 bp, Setaria italica
  Intron number 2 from transcript Si030993m (locus Si030796m .g) derived from phytozome v7.0 (chr-ID scaffold_2; pos 24 320640 to 24323147 reverse strand)
cggccaaccaaggagagtagcggaggggctctcaggtgagttctagataactctcttcttttgatgcgtgtcctgtgccagcagtagtggttcctgacctggaacttttgtgtccccatcactagcttgatttgatgccgcatcaaacgaatagtcccctggcttagcaaatttgttcgtagacaattacactcgaaaacttctgtaactccgctacgaactaattgcatacagctcagtgcactattatgaccatttcatgcactgttacctgtaaagttcgaaagaaaaaaagggcagtaagaacgctaagaacaaagtactatatttggctcctaagcagtcactttaatggcacgtttggttttggcctactgctgccccgccaaccaaggtcgcgcctatgcgtagatggacaattcctgcgcccacagcacgccaatgcaacggcgagaaaatgaactagtgctgggcagctgcgggcacggatgcatcggcgagccaacgcgcgggtgccgatccaaacagcggccaaaatatgcacgggcacgcctgcgattggcagggcacggtttggcaccgaaccaaacgcacccttagtgtcgaatcatgatgttactttttttttgttaaagataaatagaaaccattcaaattgatgtcttgtttgagctttattatgacataaatcactgggctgtgatgtgagaatactatgcattgccaagtgagtatgagatttttctgttatccacattcttttatcttagtgagatagtcatagtcagtaactcccttcaaattgttgcccactttccatcaatcaaagtcttgcacaaacttccaactgttttctacaaaatgacacttcaaataatagttcaagcaccttcctggatgtttcagaagtttagaggatcagggtagtcattttaatagtaacatctttcgtcaaaaggtggatttgttgttgatttggcctttactttgtgtctaagtttataatacgaaacaaaaaggtccattttagtaccctaaccaattctgtttgtgtggctaaccccctgaacaaaacttaggcccaatttactcccccaaactattgcacttaggccaatctaccccctaatgagatttttcttttttttttctccgtgcacaggttgaattttaagttcaaattttttgagcagatagagaacatgatgttttatgttagaaaaaaatacattaagattttttaataattatttcataggttaagaacatttaatacaactttgatcccacagatacgaattatatgaaaactatccgtgaaaactttctaaagtatttttctaaaatagggcatcatgttacaagtcacctcacaaaatttgaactaaaaacttaacatgtacatggagaaacaaaaaagagaaatctcattaggagtagtttggcaccaactgatatagttttgggggagtaaatcgagcctatattttgttcgggaggttaagcgaataaagtgaaaattggtgagggtagtttcctaatacaaaatcagttaacaaaacacagaaaccttcataagaaatttcttctgggcctaccacatttaacaaaaacacataaatttgacagcatccataaacctgcattaacaaaatgcaccattcaggaagctaagcattatgaaatctagagaatagagtcatcagcaatcttgctttcttgtagggacttttcatgcatggttaagcttgccgtgtgttgtactatgtgctcaaaatgctttaaaaacaacaataaagcctttaggttacaaaaaaattcaggtaggctaggacatgcttaaaagtttagataatgaaaacgaaaatagtacaagaaatctatttatacacaaaagagagatcactttcggccataagagtgaaaagccattaatgcctcacttaatctaatcatcagcaagctacaagtttcaaccatacactatcaacatctatgcaattggtttgagggatagccagaacatagaagcactacgcaagatttaatgatgtgttctcacatggtcaatttaaataattttatatgtattagtggtcaaaatcatcaaaatatgctcttttcgttaagtgtaatatatctttgaagagagtatcatttcagttatgaaaatggaaaatagctagataccgaattaattgtggtcttattttattatcggctagttagctttagcatcaaggtttgtcaagctagattgaaacaaaaatagaatattgtctattttcatattgctgtggagagttcttttctcttctcctcagaagctttggtaccacggtttgatatctgtactctgttttagttaccagatgaaaaactgcggattgaggccagcctttgctttggaaactggtgggccatctaacactgatggccaagattttgatgaggacagtggcttccttggtaggacaaggctgggcagactcatcctagccgctggaa

SEQ ID NO: 14801 - DNA, 1615 bp, Setaria italica
  Intron number 2 from transcript Si034900m (locus Si034900m .g) derived from phytozome v7.0 (chr-ID scaffold_9; pos 55 84459 to 5586073 reverse strand)
aggtatatctatttgttttcattacctagagttcaactatttacatacttctcatagtgtcatatctaaataaaattaagatcacctgtaaacagcacccctctctaacttgaacaaaatgttgttctcaataggtcaagaaaagccttctatactgacttactgagacttgcactgaacacaatatagttggcccaacagttgtaatttctttgatttgtagttatgctttaatctcataatcaatcattgaactagaagcaactagcatatggtttgatgaagtactcttttattattacatgatttactttggtgtcaggtagctctcttttacttcagcgggaaccttaacaacatatcccatttaaactatgataagcaaatatgaatctggaaaagatacgcaatgtccttttgtattgtcttttaactatgcaaccaacaggttctacagccttttccccacatagtaactaaatggatttttcaattttgtcctttatttcccatgtttacatgcgtacatctagatagttatttttcatgtacttaccattggttatatctgtaatgacatagatttttgtaactttgcatcaccgcaaatacaatctgtggattacccagtatcctctcttttatgtgagttatgtgctgcaaaattgataccaccggatttgtatttaaagtttagtgattatgattttgtaactagtaataaaatatcacagtaaaattttatggtcaaaaatcaattttgcatagtgaggctactcacctgtaaaaatgaaataagggagtattcttctacagttctgtacctcagtgatttttttcccaccagaactaccttcattgcttacctctgttgtttttttctttaagcactttacagtttttgtttgtccaatcatgatgctacgattttaaccatgaaattgtcttacatatgtatctcctatccattattatggatgcatttgtgatatatattttgagaaagtgataactttcatcatgtccaaattgtttttgtgcacgaatagtaaacttgatgtctaaaaaacagactacaatgaatggttaggaaactaatttatactaaggtgatagagctagaaactgctgcttctttctggctgcttctgctgacagtgcagtttgttattactcccttttgactcttgagtttttgctgcacccagactgggctgaatgagaattttgtttgctatttcttgtgtcctgttaacaagaattaatatatgaatagcaaatcgttttttattttttatggtatacggtcttgagcctcatagaatggtatgagatgaaaatttaatttgtttggattgagctaaagtttaaagcatttatcatgtggtttattctagttaattggcctctgcaatttttggggataaactgctgattatttcttgaataaaaaactacatcaggattcttgatttgaacagtattttgcatgtgccaagtatgtgccccctagacagcagtatttcatttttctgaggaaatgatttgacttgttcccttaccaatggagtcatattctgagcaattctacctaatgcaggatcaccttgcgctg

SEQ ID NO: 14802 - DNA, 656 bp, Setaria italica
  Intron number 4 from transcript Si037545m (locus Si037539m .g) derived from phytozome v7.0 (chr-ID scaffold_9; pos 56 944708 to 56945363 reverse strand)
gtgattcatctattacttcgagttgatttctgaaggtagataaaattccgtaaacattgtatttattttctctctcatgaattagttttaaattttcagttatcacttagttttctcatttgggactcgaggctacagatctgaatgcttttgcttctaccatttagtccatcttgtttgttgtgtgtagtctgtatgtatggtagcactggtctgctgcaatgttagtggcttagtgccagtctactgtgatattagtgactccatgtcagtctgctgtgattgttagtgggttattgccttttactcaattacatccaggttgcacgatttgttcatttgttgttgttagcttggtataccctcagattcttcatatgttaattttgtagtagcatgaatgctcgtgttgctactgaatgcattaatgtgcttgagttgagcttctcttttctatactggatcatgacctcgtgctcctatttttgttaattctgaaaccctagaggaaattttgcatctgcttggaatgtgggttcttcgttttgtagatgctttataattgtgtttggcccaacgtgggcttttggattcatatatttgtcaatgcacggtcctttactcttttgttctgatctcttttcatttgatgacag

SEQ ID NO: 14803 - DNA, 1314 bp, Setaria italica
  Intron number 3 from transcript Si026893m (locus Si026893m .g) derived from phytozome v7.0 (chr-ID scaffold_8; pos 19 349711 to 19351024 reverse strand)
agaaagctgtaagtaacccagcatttcccaccttgaagtgcttttgcagaagatatgttggttaggagatacaacagatatctaccattcttttaaagtagtcaacaaatatctaccatatcaaggcgaataatttctttcagttttgagcaagatatgcgcatatattcttctgtcatgcagaaactactggtctgtgaaatgctgaaaattttgtttgatcacttaataggacatcaactgaagtaacaaaattaaaattcaaataccaccaattcttgatgtaaggaaagcattaactggatggttagaaatttgagagaaataagtatatctcatcgccataccactctaatattaattcagcagaattataagctgtttgttgatgctcagatgcgctggcgcatgagcacgttatgtgcaatgagggcttagggcttgcccgaaagggatctcatttggtcaagcaaaattttaggttgccctagcatagctaggacgttctcactcaccgttgagatgaaggaagaacagaaaacctggggtttggaggggaatttaggatagtgagataacgtaatagagatgtatttttgatcgattggatacctcaaccaaccatgtcccttcatatttataggatggggaagtcttgtcttatctagagtccgaatgaatacatcacggaatgcatattgacttaattttctagctggtggaatctcttgatctccataactctcttatctagactccaaattggacgattcatatctgcactttgattttctccgtgacagttttactacgagcggtctccaaaatgtaatttgataccaacacaaaactacgatgctggtttcaggaaaccggcctcgattttcccaaactgcctagtatctctagttttggtcgtcaatagttaacactgtcgtgaaaggacctctagcctagtggttagagcacctgagtatcatccagcaaacttagattcgacttcccgtgggagcgaattaaataggtctggaattaaaatatatataaaaaaggttggggcttcccctactaacaccaaaaaacagttgacactgtcactattgtttcaaacacccaagtcccaagatctactcttgacaactgttgaagcaccttaaaccgaactagactgcttctagccctttcttcaactttctcctagatcttgactggacatgagccaaaagttacatatagaatcaaaaatcaattttataagcttataagtcatcttgtgaattgtttttatttattgcaggtttcagcaatagtatc

SEQ ID NO: 14804 - DNA, 3648 bp, Setaria italica
  Intron number 3 from transcript Si023477m (locus Si023477m .g) derived from phytozome v7.0 (chr-ID scaffold_3; pos 19 4953 to 198600 reverse strand)
ctgtttccactcctatcctaattgaccaggtacagtgttggccatgtattcactcatgtcctgtctctgctatcacgttgttgctagccaagctcgtttgttgtcctatattttgaaaacatggaaggaactattagctgtttgaaaatgaggaaatatgattttaagcacatgcccgtgtggccaaaccacctgcttgcctctccacacatgttttttttaaaaaaaatgggttgactagtcatttagtgcttacatttgatatctctcattcttgaaaatgaaatctcacccagaccacccagcccgtatcagaacaaatccaggagacatctgaaaatctacttagcattatagctggatttttttgaggtaccactgaatctgactcaagtagctttactcagatgtttgtgtcaacattattgagttgccatcctggataataggtaggtgggaagttgatggcaaatggggaccttagaacacttttttcaattgggctgttcacgttttctttgttacgcttttgcatgtgattgagtacagctattttgatgatcttctacactgcgggttggattagctcatcaaacgacgagacctctacttattcacgtaacatttgtaggactccacacatgagcattattcagagcctatcagggtcacttaacagttactaacagtagcatagatccctactgcctgaatggattgatttaatttaaaatgtcgtgtttgattgaactggttagaagtctagtcgtctaggctcctaaagagtagagtgggtcaagcttatcaactgtttccgatagattttagatctcataactatcatagtgaataacaaagacagtgctaaatcgaataaagagagtattaaccattattacatgaccgaatatctcaaataaaccacaaagtctaattattacgcagcggaaatccaaagacgacgacaactccacaggcagctgactgaagaaacgtacgcctagaactcctcaaagtcgtgtagatactcctcttcccaattagcttggtctgaacagcggttttgcaagggtgagtacacttatggttggtactcaacaagtcgtggggaatagtgtagtgtaaggctaaatcaaggtatggctaaggcataattagcattcgcttttaattaagttggtcaaattttattagcaactaactaagtataagttcataccacccgaaattaaacatgatcataaataaagtaaacaatatatgcatgaaatgataacaagttaaatccatcttccgataatattatcatgtgagggtccaggccgctcttaaccgtgagcacggctgatcgatcagtttaacactctgcagaggtggcacttctttacccacaagtcgcgtaaaagttcaaaagaactttggacccaaccatgcggtgtttgcaaggcaccataccacacttccgaggtgtgattgcatagggacgctacgaggcctttacaaagattcgctagcaatgtggtaacccgctaaggtttcaggtcgaagcgaaacatagcagtcccctagagggcatagtgtcttagccaagcccacttcccaagagagcgagtgctatatcccatcaacgcctcccctcttgccctttcggtaagattaccccaaactagagtttctaattattcagccaagaccagagccatatagtcttgtggtagcactgttttcctgggtggttctccatgttccgattaacaaataatgatcttgtcttaatgaaaggtataacagaagtaaagcaagattaagcattgtgtagttaaaccaccatgttccaagtaagcactaagcatgagctacccaacttaaagtaaaccggttggtcaaggcaaaggtaaatcaatctaggcgaaccttaattgggacccatcaatttaatcttaatatatgcatagcataaatgttgagtacgagaaagtaaaggtgtataggacaaaaaggtagtgatcaaggacacgacttgccttcttgaccttgctcctgctgttcgtactcctcgaaggcttgatctgcaactccctcgaactgcgggacgtctacacgcgtcacacgagcacatacaagcaaacatgggcaaaagtaagaaaacagtacaccaaacataggtaaacagagaaaacaagcttgaaaagttgatctacgctttaaaacgaacacgtgggtataaagaacgcgaaaaacggagttaagatgcaaaagatatgattaaaacaagatctagggacttttctgagagaaaaataaaagttttagggcctatccgcgaaaaccgagggcttatacgtaattatgcatataaaccgaaggtctgacgtgtaaaaatctcaaatccagacggcgggttaatttctggaaagctcaagggttaaaccgaaaagtgcgagggcagatctgtaaatactttcaacgcgatctggaccgcgggttgatttgcgtaaaaggcgggggtttaagagcgaaagcggcgcggcgcggctcggttgaccggtacgcgaccggattgacttgccgtgagccgtcggatcttgatccgacggtcgcggtcgtcgatgactcgcggcggcggcgggaaaagagacggccggcggcggcgagcggcggcgcgcgacggcgagcggcggcgggtcgccggagttggccgaaacggcgctccggggcacggtttaacgcgcgggttgcaccagaagagagaggggaacacgacgaactcattttgggggttcttgtcgaccggagctcaccgacggcggcgctagacggcggggaagcggcggcggtgtttggagcttcgggcgctagggttttggggagctgcggcgctggtgttggcggaggagaccgggaggtggcggcggcttatataggggcttggagatagggcgccctgggtttgaatcccccggaggattcggagcggagggagtccgaggcggagacggcggcgcggcggttgcggaaggagtccggccggaggtgggagatgatggcgggccccatctgtcggcggtagcggcgataggcaggccgaagcggctacgcgggccggcgcgcgcgttcgtgggccgcggggcgcgggagagaaacggcgggccgcgcgggagatgctgggccggagagaggaaaggtggagcaggccgagcggctggccggaggaaagaagaaagaagaagaaggagggatgcggcccaggtggaggagaagaaaagaaagagaaagagaaaaaaaggaaatggttttggaaatttgaatttaaatttggaaattcaaaatttggttcaaactcaagcaatcaaaataaatgcaccagcatgaatgcacaaataattcctatgatgaattaattaaattaaagaaaatgaatttaaatgcctagaatttaaatgacaccctaatttgagccaattttaatgaatttgaattattcaaaattttgggtgttacaacactgtttggagaaaattaaatgtctgatgagtcctgaggctgctactgtgtagttttttgtttatctcagagtagaagtaaaaagggttatttctgtgggagttcttatctgctatgctcgtattgacaaccttgtttaggggg

SEQ ID NO: 14805 - DNA, 1609 bp, Setaria italica
  Intron number 1 from transcript Si031276m (locus Si031276m .g) derived from phytozome v7.0 (chr-ID scaffold_2; pos 38 628807 to 38630415 reverse strand)
aggtcgaccagggcaccctcttcgacctcatcctggtgaggcccccctcctattttctcctcccgtccctaccacttcgatcattgtttagatctgtttgtaccctctactgaaaggttgatgattgggttgctgcctccttgttgagagtagggttattttgtgcggagattggcaaatacttggaattattgctatgctattctgtgcttgtgttgctactgttgccttcggggtttatgtgcgcaaatgactagtatagtggtgatgactagggacgcaagtgggctccgaacccccttaattaagcctatatgtgagtttgttggctgacccacttttatccctagcgatggtatgtctgtcacatgcttctggcatgttttaggtcaaaattcggttacattatatctgattttgttgagttttgttaatatgctccttctaaagttgtatcatctttcaaattagttttgtatattattgggtcaaattcctgtggtacctcaattgctattatgtaggtatgagaagaatttgtgcaccagtgcctatttaagggtcttgaactgtccagaatgagttcaggatatcatcatctgttccaattgctagaatggtttgttatgataagtttgttagagattatgaggggcattgttgtgggtttggtgcaaattgtttgtctgtcttactgctatttactttttattgtttcctttcaaacagcatatgttatgttactgtaagccaatgtttaatatgattgtcctgatttgtctccttgtggtattgatttctgtgctgtttaattaagattttgagtaagtattaaattcgtgatacttttatggatgctgcagcatgtttgaaattattggattggtgcatcagacagtttagcttattgcttgatgctttgatgcctctgctgtacttgctgaatgggtatacattgtaggactggcacacatcattgatttgaggtgctctggaaacttggttgtttaaacttaccatcgttcattcatgttgctatatagtgcatatatgatcctttcttgatgtcaccatgtgcaatattgcaagtagattagaactgagtatgtttattcttcactgttgattgttttccttgagatgtatgattttttagacatgttcggctgttttcaatgtttaggttgtcttctatttgcttgatctgtatattttttattagatatcttattatgtgatatttgaaattgttcagttggtaattatgaatggtttggctggcacttaactgttaactgtaatttttctatgattctgccatgattgctatacttgcacagtagaaggcatggataaactttaggtactgttcaatgctgggataataccagctttgccttggattgatatatttaacaggttaaatttgatgcacgttgtaggaatgtattgtgtacttgtagatatatatttatcgacttcattgtttcattttatcaatttgtctggcttgtccatattgctgcattcatgaatgtttgacaagaacccctgacatatgttggtcttgacaggctgcaaactacctggacatcaaggggctgctgga

SEQ ID NO: 14806 - DNA, 1296 bp, Setaria italica
  Intron number 2 from transcript Si031287m (locus Si031287m .g) derived from phytozome v7.0 (chr-ID scaffold_2; pos 29 112114 to 29113409 reverse strand)
agcacgtcgaggagatcgtcgacatctgcacccaggtatgcatctgcccccgtagtctaattttacctcgccattcttgggatgtgtacttagtgagggctcttggattatttgcatgaattcattcggaattcgtagttacaacatactcggcgagaaaatgccctgaattaattgtgaaataaggactgaaaagtttgtgtattgcctctgaactctgaaggatgccctgaattaattgtgaaatcaggactgaaaagttagtgtattgtctctgaactctgaaggatgcaaatattctcatgatggttcagacttcagagttcatctgcatatgcctgttcatacctcatagcttattctggtctagagattggtgcttgatttggtataatctaaaaggctaataatctgcatatgttatgaaacgttttacataggttccattccatcaagccttgctaaagtattggtttcaaaatgactttgttaaagaagcagtctgtgcagactactgcagggacagagcactgtgcaggttatacggagtagaggagtctagatccgcatataactattggtgttagccatgatgatattcctcagaataatcacgcctgtcaacagttgcacccctttttttgaagcaaaaggtagagaattggttgagttggcgtggtgttccaactatgaactggattgacaaaaaataaaattgaaaagtgcctactatgaaggatgcaaacggtttcctgatggttcaaatttcaaatgcattcttgttgtttcagggttaaagatttatagttgactgcaatccaaataggctaaaatatattggtatcagtgaagcatctttgaatcggttacagcaggctttgtctgggtggaaggaatctcctcagattacagagacagagcattatgcaagttgtacagaattaggcatgtaaattctaggaatcagctagccattatgatggtcctgcttgaataataaccaagcttatcactagttacaacctacctctacctttgtttcatttgaattgtgttactttgtgttcacatccaaaggacgaacatagaagcattgtactctgacatagttaggcatgtactggcagtattttctttggggttgtttatgtaagcaagcattaatttgatgttagatgagataatatcgcacatctctttaacaaacatttctaccaagaggtaaaatctggcaaagcactaatatatgactgtttgccagatcttagggtccttcttggaaaacgattactgcgg

SEQ ID NO: 14807 - DNA, 911 bp, Setaria italica
  Intron number 6 from transcript Si032797m (locus Si032797m .g) derived from phytozome v7.0 (chr-ID scaffold_2; pos 10 477075 to 10477985 reverse strand)
cattaatattgaagcttctggaagtgggggcacaggtattattttgcacttatttattatgtgctcttgtgctacttaaggcaacacagttaaagacaagcttcatcttaatttggtactagttcttattgtattcatgtattctacttctatattttatattggttttcaagaaagactatcattcgagtgtatggttcactagtatgttggtaacttctagcatatactagtttcataagatatactctcagaatagtagagtaccgagtattctgattgagtatctgaagttttcatgtgctattatgtctctgcctgcaaccactgttcaatattggcgtgtgttacttgttcattggtggttaagttttgctgtgtgtctaaatatttttgttctgcatccaatggaattgctgttgcaagcctatagtttttttccctatgtgaaaggaccatcagataagtttctcaaactgtttaagtctattaatttgaattgaccgattcataatatagagacctttgaattaatgttaagacatacttttatcagatatttgatagttcatgcttcttgttctagatatgagaaaccttttactattttgtgttaaggtagcaattgagcgctgttccttgtggaaagtacaaattctgttttatggattctttttttttttttgtgtgtgtgtgtgtgtgatttatgattaaactgatgctggcattgttggataaaaggtacaactactaatggcttttttgttgacactgacaaccatacttcataggcatattaaaaaatcaatcttgtttgacaactatgctgattttagatgtgactcttacactagcaatttgtcttttcctctccagatttagtttgtcaatctggacctggatcgtggcct

SEQ ID NO: 14808 - DNA, 1251 bp, Setaria italica
  Intron number 2 from transcript Si028362m (locus Si028362m .g) derived from phytozome v7.0 (chr-ID scaffold_8; pos 23 757606 to 23758856 reverse strand)
ataaggaaacattgaaagaggaggaaaaagaggaggtatgtagtgcttagttaatatttccctctcttaactattctgtttatatccattgctataaccacttttctatgttatcattgttagagagttctagcatacatttattttttcatacccgattgcttattttgcgccgataagataacaggaagttatcgttgtcactgaaagcatgttcatgtgcaattgaaatttggagtttttgacgagattaaatgcccgatgccaaaattaatgtaaaagtttgttattgccaaaatcatatccagttctaagatatttggggaagttctgaaataaatatgttatcactagtagagaattggccttgagtcccgggtcacgcgttttttcacgcgaagtatgtgcgtgcgcgctgcgtgggattcgaactcacaacctccagcctcgcgtgtagctttcttgccatcccacctacacaccacatctgactatataggggatactatccttttgtattaactcgtggggacccttttatcccggttggaaacaccaaccgggataaaagaccctcttttatcccggttggtattacaaactgggataaaagggttcgagggatttagtcctctttcagtcacctcgttggggatccttttatcccgatttgaaacaccaaccacgataaatgacccccttttatcccggttggtattacaaaccgggataaaaggctctcgacacaccaaccgggataaaaaggggggtcttttatcccggttggtgtttcaaaccgggataaaaggcctctcagggtcttttttttcccactagcctttgcaaccgggataaaaggtcccggttggtgagccccccaccagtgaccgagctttagtcccggttggtgaaccttttatcccgggctaactttaaatcgggacaaaagggggcgtatcgaaagccaattctctactagtgtattgctaaaacttgtttgttgattccaaataagtgtagaattgattacatcaattcctactcctagattccacaatagtgatatccaatacctataaggtgcttccttgtacaatagtcacgatctgcatattcagagaataaaccgaaaagaagcctacaacgtgtctcctttttcgtccacacttgttaatcttgtttttcgttgtttagttgtactaactttgcaactttttactggattgaggttgttcttcagagaagagggcc

SEQ ID NO: 14809 - DNA, 2456 bp, Setaria italica
  Intron number 1 from transcript Si001038m (locus Si001038m .g) derived from phytozome v7.0 (chr-ID scaffold_5; pos 94 29368 to 9431823 reverse strand)
attcggcggggaccacggatcggctcgcgtttgaggtacggccctccgatttgcggcctgattctgctgttttcgtgcgatttgaccggtggtatggagcgatcggtggtttgttccggcttagatgctcgtttatccgagagtccgggtctaggcgtcggttttcgtgcgtgctggcccgttggatggcgcgattccatcgggcatggaggcgatttggcgcgccgagctgaggaatgcgattcgcgctcgttgattcgtttagagatgtttagagtcgtagcgaggtgtttcgaggaatcgtcatggatagatggatggggtgtgtggttgggattctgattctacaatctcgttggtcatgtggactcgtatcattgcggataggtggatgttcctttctggtaagccatcatgagagctaagctaccataattgtttctcgaaaagggtagttaatcgagtttaattctacggacaaagattgcttttttagaactgagcatgtactttccattttagggggtatacccctgagcacccctttttctgccttcgctactaagcattgttctggtagctcttcaaatctgcataactattctgctccggtatccattttcacgtcttctgcatcttcgacttatcctcgttccatgctttgtagtttccacttaaacattgtgtggtgtaaaaatggcaaacgaaacattttttcttatgttgaagtgaatgcagggctgatgtttagcattagcaatgtgacttcgggcctattagagtttgattttcaatccagtgacccttcgatgtgtgatttctgttttgacatgttgatttccattgacttagaatgtactaccttcaggtagatggatatgatggttgtctgcatttgtttacttgactactcagatatgatgccgagatgctacagtaggaatttgtggtgcatttctcccagtttatactaccgtgccttcggaacacctgtcttaggcatactccaatgtcattggtgttgtcctcgtagtaatacaatgtggtggttgtgattcagctacattagacatctgattgtctgaatgttgtgtgatgttcactcgtttgatgtcttatcgggacattatctggtagtcatttatgctgttggtcatgtgatgtgttggttaaagattaactctgttcttttgatggtttatattcatatcacatttgctgctttaactacttacatctaaacttttatagtgtaaacatggaacctgacattgtcatttgtgaaatgttaggttgtagtgagcatagttcaatcagagtgttgatttagcatatccttcaatacttactgttatgaaattgatcatgcgtagggaagatgttttctaacctcttagttatgtagaactagaaagcaagaactcatacacaggattaaagctgcagcttgtctccagttttgcatgctgggagtgttatttctgacaagatgaatcatgtcagaaaggaatacaagctagatagctgttgattttggagtgaggtggatttaccaatggacagaggaagggcagaagcacatccagagagaattttaggaatgacatagttggggacatctgggcttgtagctttgagcatttcttcttccatttgcaatctgctctttcttctttttgttcttttctctttgtatattatgtttgctggtatgtaaagtaaaattattttgtttgatttggtttatatatttaataacaatgtataaaaagattggaaagaataatgtgatatacaatgtggttgtaaatccatttgatggatcattttgcgttgtttataggtgccatgtcgctgggtttaactagataagtccccttggcagtttgtatatattgctctattattgtggacgatgagggcacttcaaagtgtccaaatcagtgttctgcagtcagcttaccagttgttacatttacctgtcaagggatgtgaatgattcggtctaaaaccttgtagcccatttacttctcgagtaaaggtagtatcatatggattgcatatttgtgattcgactatgtaaatgtctcataagggtggttctgctttgggtgtgagtgtgacctttgcagttttatgaatcgattgaaattctggattcttgtgttgtgttgtcttgctgtccctcattatgctcatttcagaattgtgtttgttttttgattcatgtactggcaatcaaacattgaaatatggaatgaacttgaatgatttcggcacttattttgtgatagcttacacagcatatatcagtaacctagcaatattggtgataacgtcatggcaatttatttttttcattcaagtttttaatgctatatgttgatgctggattattgatatagattttattttcatttccagattaagggcggccagacctgacttcttttttt

SEQ ID NO: 14810 - DNA, 1367 bp, Setaria italica
  Intron number 6 from transcript Si010465m (locus Si010421m .g) derived from phytozome v7.0 (chr-ID scaffold_7; pos 22 178081 to 22179447)
ggggtacctgtaggtgggaagtgtgctgccttttactatttgccgtgctctgccttttactatgtaccatgctagcatggaaaaatattagcatctctgcggaaaagcaaatatgatcttaaggatgatgacattttccccccaaaaggacacttgtgcatttgctaaatttatcaaggatccatagatattaaacttattaggatgtggacttgccaaaatgcgtgcaaagatgtgagcgcatgctgttttagggcttctaagacaagaaaacaaatcaaatggagaactgtggtgattggaatgaaaacacctgctttgctacatttcatttctgagatgcacttggtaggtgttcaatgcaaacagtaaggccacctggttcttttctgtcaaaaagtagaatcatactgtttctgttagcaaagtaaattgatttccttttttttagaaatggagctgcagagcttatctagaatatactatactatattacatgcttttgccataacattggatataatggctagaaaaagtaggcagaagacaattacttcgtttcttctcaaacaagagggctttgtgttgtgctatttaacatctctgctagcaagtttctatttactcatcatccagtagaaatgagctgatgtctcaactctcaatatgggggaaataaaggtgcaacctgggtttatagactcaccattccaaccagtgctcttaaggtggtacctttggtgccttgggtgtgcctaggtgacaaggattgactaggcttcccgtggcaccttatcaccatgacggggatttaagaacactgattccaactactgttgggaagagtggctatgttaagaatatttttgctgaaaattgaacctgcatagtatcttccagaatttaaaaggccttactgtttgcattgaccacctaccaagtgcatctcagaaatgaaatgtagcaaagcaggcgttttcattccaatcaccacagttctccatttgatttgttttcttgtcttagaagccttaaaacattgttcaactaggaccaatattcttcagctgcaaaccttgtttaaaacaaattactgtttcttacaaggaaaacaatgttatgctatgtgtttctaattttctatgctagtctacattgttttcttgtgtattttggttgcaactctggatcctccagttgattggttataacttagccctaaacacataatcttcaacaatttcttgaaaaggtttattgcgatgtattttttttctgaaccagttgtttgtctagttgaatatgattttgatgaatgttttttttacaaagggcccgaggaagaagattctccttgcattaggtcc

SEQ ID NO: 14811 - DNA, 3888 bp, Setaria italica
  Intron number 4 from transcript Si022140m (locus Si022140m .g) derived from phytozome v7.0 (chr-ID scaffold_3; pos 22 048900 to 22052787 reverse strand)
ttgctgaactgcttactcgccgaccctttgcccaggttgacaacaacctcttaattcttttaatggaatatatttgttgtttattcaattctattcaaggctaagaaatgtttgtatgctcagaatttaatgtccatggctaagttaatttgttcattgacgatgcactaactacatgtgtcaactcaatttgtacatcaacttccatttttgtagcaggaccagactattattttgattggaaaactgtctgttgctagttaggccataggactgatgctacaataagcctgttttgaactgctagataattgaattagttgcctctggggaaaactctgaccgtagggtgtgtaaattgggaatttaattgcacccattcacaaaatcctagcacttagcaatccatataggtagaatcaggtgtattaagcctggctctaatttttgtctactcattatctacatgcattacgtttggggtacaatttcttcgaatataaaccttcataataatactttagtttgacattttgagcaccaccaggaccagtgaaatggttgctgtagtctcagctagtcattgactggtatgattttgtaactgggttcaccagaaggctgacactaggctatacttgatatcaaatttttcttcttttctgtcataaaatgttatgaacaacattacaatccatttattcccaagcaagttgggggttaggttgtaaacaaaggtaaaagagaaaaaaggaaataaaaagagaaaagagttcctagcaatattaacatattctatgtggattatgcttgctttcttgaaacgctgcatcgctactttcttgtttctttctttgccatcttttgaaccaaatatgtgatttggaagtgcatacttgaaggacctgtggcccagaggtcctgggttcgaaccagcctctttgcagaattttaaaagaattttgcaagggtaaggttgtctaggaattcccttccccagaccccaccttgtgtgggagatttcgcactgggtacgcccttttattcatattcgtgaagccatatattttttgtccgagctggatttgaaccagcatagacatatcatcaacgaatttaaattacgtccccattaactgctcaggcattgaccactcgggtacagtttcttcattgtatttgcattttccatgtctggaagctgaattatcgcagcatgtgaactgaggccttacggtgcatttggcaaacgaggggaaaaggcaagggaattagaggtgtgagttgacagggaatttacattggagttgcactttaatcccagtcccttgtgatgaaaattaagatgaaaagttcgagagaggtcttatccgctgttctgttcgggggtttgggagtgggaaattatatcataagtcaagatgaacgggtgtgatccatcgatcttccacttaaagcacaattcctatccaattactacccctccccatggtaagtccgcagtgggagttggtcctctaaactcccatcccccatcccactaaaactccaattcccactaaacaaatgagagaaatttaagctctcacctcttaactcccattccctccaaattacccctagctaaacaagctattaatgtcattgccatgtattggatccacaagaactaacaaaatctttatggagaactattgcattgtgttttcgttgttttcagctgtaggctaccctatcttgattgggacaaaggttttttttaattgcattgtggttttcctgtgctgtgcgctcacaaagttcctttggacagcaacatagagctgagagtggatgtgttgtttttatgtagtgaaaatttgttggtgcttgtaccattggaaaataaagtgtttacttgcttactggttatcgttaccattttgcatttagttttagattttgtgaactcaatctgctatttagaaggaatgcccaatcattttaagtttattgacccagctggtttcaactctagcgtaccccaacttgcttgggactaaaaggagttaatgttattgatctgccatttagaattaatggccaagcattttattgtcctagatttagtagtcttttcttgtgtgctgcagggcatctgacttattaattttgaccccatatgtcttgaccattatccagaaagtttgaactgaggaatccaatacacttgtgaaataaatatgtggccccccctcatggcgaggacatctaaatctatgtgtagatgtacccagttttgaaatttcacttgtacggttcaaagaattctcaaatagtccatttatgtgcatcatgttaaatatgtatctgcaaaaatgttgtggaaaaatatctatttgtgcatttatacagaaaaaagatacataaggtttatgttttgtacaaacgaatattacctcctgttttcttataaaaatattttatgcattcttttgggatatgtaaatatttcagcatgatgtaaatgtatggtttaaagaatctcttgaagtgtacaagtaaaaaagtacaaatatgtgtgtcacgcaagttgtagataaccaatgtccagtactgttatgggtttagtttttgtccaagtcaagttcttagtagatggagaggttttgattttagtaaattaggaggttcaattgcctttaggagggtgttgagtttttgtccagtactgttatgcagcctctttgaagaatttaaaagaattttgcaagggtaaggctgtctaggaattccctgaattgcctttacccagaccccaccttgtgtagctttgagcactgggtacgccctttaggaggttcaattgcttatcatcagaagttgatatgacctggtatgaaaggtcctttatccatatgagtaaagcaatcttgttgcactttaatgcgagcttgttactttctggtgcattttaggtgtataattgcagctgattgagattgtttctaagatttatccattttcatatattagccgtttttaaaaatataactttttcaatggtactgtccttttattgaatatatagaagtccactaaatgttttgagttcagttaccacttgacttatttcctgcgaatggatttggtgctttctaaaattcctaatggctttatttcctggaattcattagtgcatcagtgtaggggtaaactctttgcatgtgctactagacaccaatcgatttgcaaaaagtgagggagcaatagggagggtattttggtgtgacagaaatagtattgatgatttcatttcttcaaaattttggcagttacggctcttagtgggtggtcctgcgaaaaatttagattggccaaaacttttcactgttgtttgaatttaatgatattttagaattttaaaacaacacttacagctagttcttctcaccttgtccaggtttgattctgctttaggtgttgtttttctcaaatttgtttcatatggttctgacatttggaaaggaaaattttttttgctctgcttgcgagaagagttgaaccagcgaagtcaagtatgggcacgaggcgtgcctcccaccaagcgagttgtatttcttaatttagtatagtgctctgtttctatttattcttgcgtcaagaaatttaaattgaaaaattatttaaacaatttggatgaaaaacaaaatcataggcccagcagttaattttttaaccatagagttggcactagcaagaaccatgctttggtttttatcttgttgaacagtgtacctagatgttgagactgattaatattgacatgtagcaattcagttatgttactgacacaaaaaagttatttttgcagggttctagtgacattgatcaacttgggaagatttt

SEQ ID NO: 14812 - DNA, 1977 bp, Setaria italica
  Intron number 1 from transcript Si036294m (locus Si036224m .g) derived from phytozome v7.0 (chr-ID scaffold_9; pos 52 926016 to 52927992)
tctaacttccacagctgcgaggaaagcttgctgaggtatgctgtacttgttttctttattatcacaaactagcacatcccattattaggacctcgtctaagttgtcctccttgacttggaccaagtgcttaggtggtacaatacgtgctgttgatatttctacatgtcctgtcatgctagcaacctaacatgcttgcgacgtgccccaagcctgtttgacttccatggctgtcatggacaaacgcattatgccccccacgagcttatttgattgtgctagctgctaggtggttgttgcatactggtcttccctcttctcttgccacctcgggctgcctcaactggcttaaaaagatacatgcttcatacctagatcatttggagttggagttgaattttggttataagccatggcaaattcccgggctggacgttacaaggtatttgttgacctttgcttggattctttacttctttatctggcatactttggtcgtgttttgatgctgttatgaagtgtttctgatcctgctgcctcatcttttgcctttgattttgttgtgcgacttcttttaagtacttgttatctgccttttgcttttgccttttggtgtctgcttcatcttgttttgtttttgtttgaccttcctgtatctttaccttgcttgctggttctgtatcacaaatatgatttgggtaacatgtttgccacagaagaaaaataggatggcctgacacataaagcagacttttactttctctctgtgaaatttttcaatattcagtatttatcagcatcagttgataaaaactatttcttttgttcagtaaattagcatttacagctataaccttcttgatgtgccttagatttgttttttttatttggcatatatgtgttggaagttgatccttgaaagtccttccataccaatcctagctgggagtgcaggaaaatgtggtttgatctttaacatgtgatgttgatgatctctttatcacacaagttactgaatagtgcaactaaatctggtaaacacaaatatacttgtgcgcagtgttgttagtcccaattgttactgtatgaaacttgattggaaggtgctgatctctgggggtagggccaaatttgtggagttatgagatgtcaaggctttgtataggtgcatagtttttaggtattgttctggattgtcaatttctacattagtataatgtcagatttccatagattttgttttaagatcaaatcggtatccatcaaatgtgaaaatataggcatcatcattgcaatataggaatgacaaggttgattaattacctgggtttgcaaacagtttaattttaagggtgaagctgattttaaaggtgtggaaacctatttagaggacaggaatttctgaccctttcttttcaatcttgttcttttatggtgtgaaaccaacatatagtgattgctttatcttatgatacaattgcgtatcctaatgcaatgtaacatgtgagagagttcactggccagtatgcatgcatatcactatcatggtttttaaatgctgttgacctagccattccctttgccatggttgcagctttgtgatctagaaggagttaactcctacatactcaagcaatgtgatgaaaaaatttctcttgtgtagcattcgaaatcaaatgcagtagaagaattcagtgtgtcataactagtgaactgggagttgtacttgtaatggtcaatagtagtttctttttcttgtatcatgtagtaggatacaaactgatgatgcggtgtggaaactgaactgtgccctcttatgcttttgcacttcaccaaattcttctaagatggttgcatactttctttacattaaggaaacctaacctatgcttaagatcttaactatctgatgcattaacttcagtgtcctcatgcatttctttgaaactttagtaattgtagtagtttgcatgttgcag

SEQ ID NO: 14813 - DNA, 1628 bp, Setaria italica
  Intron number 2 from transcript Si028891m (locus Si028891m .g) derived from phytozome v7.0 (chr-ID scaffold_2; pos 35 302663 to 35304290 reverse strand)
aagaaaaggatcgcctgattacttggttctggaaggtacactgcattgttttgtataaatgcattctatcatgaattatgagtttgttgtgctgccttatattttgaccatcttctcgtgtgttcattttttcatgcaaacatgccatttctcagtaaactctgttagattttgcgggaacacaaaaataccaatcattgctgcagaccaatcaggtcagtgcatgtggtacatgtacaagtgttatgagacacaaacctaatataaatgtatgcgatgacagcatcattcacttatgaggcgtagttctgtttttttaagacatgatattatatacattcctgtcccagtaaaaatggctaatcatgcgctatccctgcagaaagtaacgtttttcaaagtatggtatcttttttcttgatatgctcttcaagtgtcccttttattttggcctccatcatgtcgtcatagcagttcatgaatttagtttgctatcatatatggtacaggcgtactgtgtttgaactggcttttttttttgtcttggttgtcttggttgatcgcaacccgggcagattctgaacctgtgaagttgtagggtgcaaattgagccaaaacattatgtgtatgtgttgtgtctgtggcatgtttaaaccatgaggttgaactttatggtgtgtttagttgatcccataatgagatgcactcgttggccaggcctactgttcaaggacttcggtttcattgcccttgaaatttgtagttaccacatcactgtgatgaaatcctttactattttagttttaactgttgcttcgtccagaaattttgagttagatgattgacatctgcccagcaacatcatcctttatcccattcatctcttaatcttatcaatgcaagctactaattgaaactaaggctattagcttgatccttggtgctacgctacatcaaactgtcaattgatgacattgtatgttggattcaccaacaagcaggttaatcattgctatgcgggtagtgtttttttttcttccctttttttatgagaatacacgaggaaaatgtgtatgtaattttaaggagagtgccatagtgggtatatacccaagacctcaaccactagaaccttgcactcaaccattggtccacatggctgcgtatgttttagtatcaatatgacacgattgcaccatctttctacttttttggcggctctgatgcaaataagcaaatcaatgttcttatttctttttgtaaacttcagtttcatcatacaattcttgttgatgcttgtgtaagtgagatgagaacaacaaaacaacttttcttatgttgttgcggatgcatctttgttggagcttcatcaacaggagccaggatctggttctgttgctggtatcgaccattatttatatagtgacttgtgttaaaactgcctgctttgacattgtttgaaacacggctaattgtccctcattaccttgcatgcatatctgtcaagacattcatattttttttaccccaaaattcatctttcttatagagcaaacgcattatgtattaccaatcggtttcttgcatccttggatacttatttgttcatactgcaggcggtcgagcgc

SEQ ID NO: 14814 - DNA, 1608 bp, Setaria italica
  Intron number 1 from transcript Si001237m (locus Si001237m .g) derived from phytozome v7.0 (chr-ID scaffold_5; pos 46 972147 to 46973754 reverse strand)
ggcgtcgacgcactgccacatctcctcccgccaacgtgagtatccctccaatctccaatctctccattctcgatctgcacgtttgtatgctgctagatttcgtgcatctgaacacatattctgttaggttcttctcaacggcaagttcaatctcagtagatacaattggatttgattctcaaggtctctgtgcaagcgggccaattttcccccagatacccctccgcgcctccctccgcggacgccgcatccttccgccgcctccctcctgcagacgccgccacccgcgcctccttctgcggccgccgcctccacagaccgcgtccctgccctccgccagctcctgtctatccccgcccgtccgccgtcgtccctctgcccagatcccggccgccggctcccatccatccccacaggcggccgcgactgtccatcgccaacgccacaagaggagtaggaggacgcgtctgatcgccccactgttttcacatctctcctcgcttcaaggtcatgtggtgtggccctctaattgtgattcattcatacttgcgttcttttggcagccaccgaggataccactcgtccacagagtctactatgatgagattattgtttactacgatactatgctaaatcagagtatggatactaaagaatacgtacacaaacaagaatcgggaacctagttttgttttgaattttggtttatcacaaatgtcaatttgatttctcaatttgtatgctcgtgatttggtgatatatggccatattctgaagatgttgtgtgatttatttttgcattgtacatgtagatgaagtagctgcggcatgccaaactcatcagatcatcccattggaatgaatcaaccaaacctagtaaccagagatagtacacataccatgaacgtgtacgtcatatacattgttgatcatctacagaaatgtaatgttccatgacagtccttgtgcctgcccttgtcagatatagcctagttgcacttgtacccatcaccgatgtttcggactggaccgatctatcctttggttaatttattatctttgtatttatatgcatttggtagtattgtaatataatttctatttagcaaacacaaaatatattagaattattggctccttgtattcagaacaaacatgagctatgctcagcctcaggggcgttcaggtcattttaacactcacccagcttatattcggacatcagattctccagacagcagcttatgagataaacttgctacccagataagcgaggtccagagaagcggaaacaaacagggccatgtttagtctgcttctggatgtcctcagttttaggtttgccataattagggctagccttttgccctcaactttattaaaagcagaagcagagggttttgataagctttagtttgaagtttggattaaattgctgtatatattagaattcacctgcgattattgtttgttctagccttagcccatgttcataatacagtactctctactttagtagcattgtacctcactacaatacctgacactccttcacctgctatttacaaattaggttgagctgctctgattcaatcaataaagaagggc

SEQ ID NO: 14815 - DNA, 2920 bp, Setaria italica
  Intron number 1 from transcript Si026157m (locus Si026157m .g) derived from phytozome v7.0 (chr-ID scaffold_8; pos 46 78900 to 4681819 reverse strand)
accatccgcgccggcgagcgccacgcgtccctcaggttggtgtgtttggtctctgctcctctccttccccttcgcgagctgccggattaggatttcgtttctgtcacgcccccctgatcctcatagctagggtttccgacgttgagaatgggttgttccgtcgattcgggtgggctgattgggggaattggcacgctacatccgggcctcgtcgagataggttagggctcatttgtgacgtcacggaatggatcggttcctttcagatttgcagggaaatggatttcatttccttgccaatccgaaaggattggacctgatccccaccaaaccaaattctgaaccaacccttgcggaacctcgacctccatagaatcatggtttgttgctagggttagtagttggggattctagggtttgtttgatgggttgggtgcctgatcctgcagttcctgtggtgtgctttagaccttcagtggtatgttgacgtgcatcacaccggcaccccctgctttgctgtttagttctttgagatagtttctatgtgggtacttgacctggttcgcaatcattggtgtgcgcaaaagacaaaacgagagataatttttgttgtttccgctgctggttgccaccattgtgagcagcatgatgggagtgtttggattggtggtgttgaaatttttaggagtcgataaaaaattaaactgaatgttctatgtgccaacaagattccgtttacaattgtccaaaaaagcccctgggtgtcctgtttcattcacaggtatttctttggtgacgtatgttcgaatgaaatggtagccaattgtgataattatagtaatggtatattgcagcagtaatgagccctcgaaatggaaatatgattattattaacagttggaggtgataccattactattaaggagatttgggagttgctattgaggaatctctgtatgtttgatttttttttacactgaaaatttgcaccttcaattttctttttaccggttcattatgtgctattctgtttttttttacctttttcaattagagaaaggacactggttatttactttagtaaatagataattgtgctgtttcaaatatatttggaactttctgagaacttgttcctagcgttctactggcatatcttcttttctaaaaaagcatagctcatgaaatttccatttcttgataaaagagaacacttgatggttagagatttgtcagaggccattgacgcatgacatctgcgctggctatcatgctatatctggccatgtttcatgtgtttgttgcatgaggactttgctcaagatgaaatccttgaactgaacaaaggatatgggatatatactttagcaaatccctagttatgttcatcattggcactgctaccatgcaaatacgattttacgcataatagttttcagttattcagtttttatgttggggtaccgggtgactcagtttacgggctggtttggttcctgggtgagctttcctggcctggcctggcctggcctcgcctagacagcacaggcatcgaggagcttgccagcccaggagggccaatttggctctctcacggaagaaaggcaaaaacttgccagcacagtccccgaggtgaccttgcctcgtgctgtgtcctctctcggcaaggcaacacagtgatgggctaaggaaccaaacaccccctacagttgattgggggtagcaaacatttgtgtacataaaactgtgagaggggcagagagctattaagtgggtatctaggtgttaaatgctggcggctgggcatgattcaaaatgaacatagactcaaagatgaatacaagccatgtcgtactcaaaataaatatgagccagtagaggtaagtaatcaaagggttaggaatattctttaaagacaatggcccgcctattcaacatagatataggtattgaaaacaaatgcattcatgtttcttatttatgttgctggagtcaaaagtgcattgataattatgagtactggctggaagcttcacagtttactttaaataattaagattaagtactgatagtgacacgatttaaaaataagtatccatagagtgacactagttcagctaatatattgaacctttacaaagttataaagttaatgtggtggttatgtgacactggaatgacctctttgccactaaattaggaacatgtgttggttttgaaaattgtgactctgtatcatgaattagttgatcttatgtgctatggacattccttgtgttttatcttttagctttcagcttttgtacctgattttcgtggcctgtgtggaactctgcagtaaacttaatttgtactttggaacagaagatctagaaaggaaactgtaggttgtgagagttgctatgagctgtgatctgcttggatcatatcgatttattgctcttaaaaagttagtttggacatataaagcatgctattgatatgaatagtatccttaatacgtgttgtagtatcctgcaacacataatgtccttttaggaaagcatcgtttcatgtttgttattagtttgggtagagtgcataggacattcatccagcatgtccatcaatctatgtttgctctttttcattctagatgtgagtttgcccatgctttcaaatttctgaacattaatctatgatcatgcattttttaatgtcagaaaatctcattactgttttcacaaatttattaaagataaataaataactcatttaaactcattgctgttccgctgttggctatgcgcatacgtttttgtttgggtgtgttaaacaacttgcttttaaatgattactcttaaccccaggtttgactgagaagctgctgacgtcttcttggacagggcttcactatttataattctggagtcggtgctcc

SEQ ID NO: 14816 - DNA, 519 bp, Setaria italica
  Intron number 1 from transcript Si015519m (locus Si015519m .g) derived from phytozome v7.0 (chr-ID scaffold_6; pos 17 790832 to 17791350 reverse strand)
aggtaatttttttctcacaatctacacattcatttttcagaaaaaaaagagatgcaatttgtccatttgtgtgtccaagcatctaactttctatggctttcttatatatgcaaaaattgttatttggttcagttgttagcataatatttcatgtttatgaattaaatagtcaaatcatgttcattgcaatatgattcatgtcaattcttcttaggtactaggcatgcatgtaaagcttttatttgtgatattcttcgtatatggacttctaaagtagcttgagcaaagagttaacttgtgatggccaaggatgcatcaagttacatatgctatacagacttgctattggagttgatactaaatggacattctattacaccctatacaggaagttggaaggtgcacatattactgttcttcgcaaaaggttattcaatggttaatgctgccaccaacgccaccacggtgcccgtggaatggaaggctgcgtcctgctctctcgcatcacctttcaggagt

SEQ ID NO: 14817 - DNA, 1674 bp, Setaria italica
  Intron number 2 from transcript Si011436m (locus Si011436m .g) derived from phytozome v7.0 (chr-ID scaffold_7; pos 14 002966 to 14004639 reverse strand)
ttccggcgtccagccccagctctgggcgcgctacggtaccgcatccctcttccttggccctctttctccggctcgagatcagatttcgactgctttttagttttagccatttctaggggtcagcttctttgttgccgtctcccgtgtggaattttctgatagctgatatgtactgccggatcttgtctcccgaggtttcccacggttcatgcttgagccaaaatggtagtagtagctactaaaaaacctgccagagattagttgaggataactgtgcgcgctagttgatggtctattcgtgtgaaacctcctctgggttagctgccctggactgtaaaatgttgtgttgtactgtaccaggaccatgtcaaatccaacctcaaaaactagtgttgccactgtttggtatgtgacggttaagttgattctatggccccgtcagctttgtagtccgggacaagattctcttcctcagttcttctgttgtaactgttgcattctttctgtttcttcgtttggcttgcaagtaaaagcaatagagctatctcattagtaacatcttgatttgatttcaaaattatatcacagttgttgtaaagcagatgtgcagtcaaaaggattatagcatgctatggtcatatgctcaacttagaatctagattcatctgcatcattcgctaattgcagtaggtttactgtgtgacactccactacattatttcccggatgtttggccgagtttgagcgtaccaaagtcagtttatggctcagggcagtcacaatgtagatcctgcctgaagctccatctagctgccacgttctgcaggaggtagacttgccttttacccatagtgtttgccatctcatccctctccaacaacccgcagctaaataaatttcatcattcctcatttcatccacctcattattctcaagtggggctgcaacattttcatatttacctgacactagtgtgccatgcatctactcactccaattccacagaattccatcattctgcatctcttggtttgctcattgcagctgtagccatcaaagctacggtgatacaaagcagttggtattttttcactagaaataatcttataactgcaagaaaatgtttgataggaatattgagccttttgggaaaaggtggcgtggtgtggctttttttagtattgccaatcttgccttagccaaataaaacctaaatacctgctcaactatgtaagctgaaccaagctctattttaggcctcagattaattctactgtgacaaatgcctcctaagctcattaatcattgatgtgcacacaaataatttgacagaagttagatcagcaacatgtccttaataaccttattcttgtgcaacactactattgacactgtattcttctcatttatgtccgctttcttaatggaatcaacatggcaagagcaatttttatacaagacagtgttttgggttatgctaatgagttttgtttcataaatgcactaaggaatattaggtaaaagataatcatggccacagcacattatgttttttctggatgcttttctttcaaggaagatatatctgctccattgtgtatcttcatcactgcttggttgctatatggaacatatcgttggtcttaatcctctgctattatttaactgtcagaa

SEQ ID NO: 14818 - DNA, 1830 bp, Setaria italica
  Intron number 2 from transcript Si026108m (locus Si026108m .g) derived from phytozome v7.0 (chr-ID scaffold_8; pos 35 527033 to 35528862 reverse strand)
ctgctacaagctctccaaggtatgcatgctttctggccccaacttacttttacaaggcttgtcaatggcccacacttagtatacttgtggtcctgcaatgttggccactcgaatttaggtctacttaataattcatcttgttgtgctgagtttcattttacttcttgtggtgcttgattcctgctacaactgttgttgggatttgtacttttctttttttttatataggtggaaatagaacaatgctaaatcgttacttgtcaaacactgttatttaggcctatttagtaactcatcttatcgtgctgagtttcattatacttcatctggtgcttgtttcctgctacaactgtggttgggatttttacttcttttttttataggtggaaatgaaatgatgctaaatcgttacttgtcaaacacattgttgatacttgttggttatttcctacaagttactatgcatgataaatttcagttatttgttgtttcttctggttgggtttagctgcactttatgcataggcatgcattatgtattgaataataactattaccttatagctatgaactttgttattcttttcatgttatatgctggaaaacaagactgcttcctcaagtccatataaaattttagttgtcctgtttcttgtttcgctctacacctttagctactcatgtccatgttttagtatttagacaatctatatagttctagccttgttttctgtgctgtagaatcatccactttccaacttgtgttgtagctcagtgcacagcaggcccttgtacacaacattataacatctgtagtaattgcattttgcaatttaaatttctgaatgcctcagacagttgtaatgtcttccacaaatttctttttggatttactgaaagctgtagctattccactacatgtactatacaagtgcatatgagcagccttaaaacttaaaagtgtgatgcttaatatgcagaaagtatgactgctcggcatgttaccgccatccagcacatatcatctccatatcatagttttacttgtcacttgtcagttactttgaaatgaccataaccttattcagttggttgtctggttgctccaccgatgataatttccatggacattattctcaccaaacataagcataagatgattagttgttacattcttacatttagaatcattccggagttgttgtggttggacatcttcgtcttgtagttgaattggttgtcgtgcatagttgtttatatttttcaagtcagattggctacaattctagggtaaatgtttccatttgcaattctcacattgtgattttagacttcttcgagcattctcattctgccattgcatccatgataaataggttcatgattgttctccaggctgccccaactggcttgctccagcctctgtttttgtttttgttgtttgggggggggggggggggcactagagacctccctggtactctttgtcagtgcactagtttgaatagctggcttgtgcatgctcctcactgtgattcttgacaattgacactgaccaaacattttctatggtgtgttcgcttttttgttgcagttggtttgggcctctgcatgtttacgtggatttggttgcaaaactaagtgtctaatggcaaagatattaactaggatatttttccatatggaagttttatttttactgaattatctgcagcacgcttctttttgtgtgtttctgattgctttcttttctgaatggtgaacgaatatctctaacactcagtttatttcctagagctggatattgcctccccaaagagctttgagaat

SEQ ID NO: 14819 - DNA, 1375 bp, Setaria italica
  Intron number 2 from transcript Si003325m (locus Si003325m .g) derived from phytozome v7.0 (chr-ID scaffold_5; pos 11 771976 to 11773350 reverse strand)
aaggtgaacctggagctgtcattcgagggaagaaggtttggatcggagtttggattccatttcttattgcattagcatattatataaggatgcactattcagttaaaattcatgaccttattttcccaagtaaatgatctgccactagtttctattaaagaaacagttttgttgagagattatattgacagttgtagaacgttgaacataacagattccttgttggtttacaatgccaaccagtttatgcagaaatagcaaagaataaataatattcacattgtatgcatatggattggagaattataatgatcacttgtttcccagtgtcgttgttcttggggcttttttttttaaacgagccaacagaagagctgctgctttattaataaagaagaatgcccgaggggcgaaatcctggggctatttttgggttgtcgtaatattagttgagctggtttctgtagttggtcagcaactcccatcattaaccatagattcttcagttattggtcatctgatggattcatcttgtttttgacccacctgggtggtagtcaatcaaattaagaaattgaggaaaaaattaactccagacaggatttatccacataggtactgggagaacatttgattgatgctttccaatattgagagaagctatatcatgcagtcgcacaacctttcatggataaaaatcattacctggagatcctatgtagaaaagttatcatatataaatatttgcaaattggaatttgagatgcaattagaagataatcaactgtttaccttttatgactcattaaacttgtcaagtgggaaatttgtcgacgttctatttcttatactgatcgatgtaatgactgtggcttcaaccaaagctttcaatttttcaaactatcacctggaattatagtttttacatagcactgcactggccaatcggtcacagtgccggacccaaaaactgcatttatcagcctatgcctgaggtatgaaactgaaggaaacacgtgcaggaagagcaacaatcttcattttaagatgaaatcaccagaatacttgtctaagtatttgttggtctcagttacttagatttgttcagattcaaagggatcatctctgtagttaatgagtttcggcgtcttgaaattcatcaagacctctatggattcctatattgtttgttggcgggtggggttgaaacctcttccttcctggaactagactgaccagactttatttcgaaagataggtgtttcctgtgcaatgatttaaatgttacctgtaagctgtattgatttgggctccgtcccgtgtttttttattgtttgcagggaccaggtggggttacaatcaagaagaccaatat

SEQ ID NO: 14820 - DNA, 605 bp, Setaria italica
  Intron number 1 from transcript Si017387m (locus Si016928m .g) derived from phytozome v7.0 (chr-ID scaffold_1; pos 39 227113 to 39227717 reverse strand)
tccttcgcggcggtgcttgcccaggtgagcggggttcttggcctctttctccttttgtttgcccggcgacccaaagattcaattctcacgatcctcgtgcggactgcggtcttgcttgttcgtgccatctttgggtgggcattagattaggaatagtgaggctgcacggactactggcctgaaactaaatttggtgtgtttttggactccagagtttgtgctctctcgcgatcaaacgttgtttgagatttggtagttctgtttgggtaaccaaaggggatggatatataatttcatcaaacttgaatgtaccctgtgaagctcgatatataattatgggatggataaccaaagggggcactgggaaatcttcaattttaaatgctatccttcatagcaatttttttttggggcttggcacatcctgtggttaaccacgattctttcctgtaaaaattctgtcattttgaatgtccgagcatcatcatcccatatcctatttcatagggcgtgcccacatgtttgctactatcacattctatcaataacttaaatgttgtaattaccaaaaatgatttagtgaatctattgcaggttctgaatag

SEQ ID NO: 14821 - DNA, 703 bp, Setaria italica
  Intron number 5 from transcript Si029487m (locus Si029487m .g) derived from phytozome v7.0 (chr-ID scaffold_2; pos 42 589806 to 42590508)
gccagtgatcttgaaaagacttcacctgttggcaggtatgttgctgtgatgctttaagctacattaatagatgtattttagttaagttgtgatgataaaattttgcaccttttgccgtttgagatcttgtttccaactatcactacttttgcagctatgaattcatttattgcttggaatttgatatcagaggggatgtttgtatttaaatttggtagttacattcttacatgaatgggaccagaaacaatgaattggtctgtattgggttaacataggataattcatctctaataggtaagtgattggtcttttgataatgatgtgactaatgtagtagttgagtagtttgttttaagaatctgttggggttagcagattcgaagtggaagaatccaggattttttttactacagaagtatagagtttaactttttattaaaaaaaagttgatattgtgttcatgtcacagagactgactaggttgcatttgatgaatcatggaatgtgacactgagaaaaactgtaatgcttgctgtgaaccggattttcttgtttcatggcagtttgtaaaaaaaatgccttgaatgtgttttttccttgcagagagtactagaggaaagcatacaattgaaagtatttactgatagtctctttgtcatttataggtctaaaggtgaatctgcaaaagttgagcagaagg

SEQ ID NO: 14822 - DNA, 2747 bp, Setaria italica
  Intron number 2 from transcript Si020036m (locus Si020036m .g) derived from phytozome v7.0 (chr-ID scaffold_1; pos 35 296578 to 35299324 reverse strand)
tggccgggcaccctcgtccaggtctccctcttccggtgagcacaagttttactactacactacttcagtaaaaacaagctggtgctgtgtgacccttctatgctgttgcctttggtatttttattctctttttttaaaagttatctcgttcgtaagtttggttggattttggctaccgtttgtggttggattttcggaggccggcgagaccagaccaacgcgttccttgcatattgcctcattggttatttaaatttgattactgctcttcagtcttcacctctggttggtcgttttggtttctcctacagctgcactcaaggcagctcgtccgtgtctgtagctttgcatagagcatcaatttgtagttttgtacaacttttaaaccatttcttactacagcctggagggagtattttgctagtttgccgacaagaacgtacgtaaagctgatagagaacagaaaactacgggctcatatatagttaagtggcaaaacttgcgatggaaccaaaaaggtgttagtttagcgatctttaccattttcttgcgaggtcaacgatctttataagtattatacgcatagcatcgtcctgccgatccttgggaacaaacgtcgccgagtgttgtcagaaaagttggtcccagatggaagaatatactgactggccgacgaaattgacaagacaaaaaaacgtcattcatttgatacctgaaggacagagaatcttgagagcatcatcatcattgaggatgcctgaaggaatcctaaatgattaatgcttggagagaaattttctgtttagaaaactgtggtcccacgcccaccacggacaaatttgtttggtcccattttcagacacccgttgcgtgctttcctgatcaactctgctacaggctacagcatgagtaggcgttatccagtacgactgactgatgagatgatatggcagccaacgatgatttcttttcgagaagaaagctagtctgggtgaggaagatttttgggcgcgtttttgttctcttctgggtaccggccggctcggctctcggaggctctcacgggccagcagcgagcgagccaggctccgaagaaacgagatccagtttcgtttctcgggagccagactgagtgctgatttctgcatgcgaacgcacgagccagacggagatgcaagcaaccaatcgcccttcagttgcacgcgcggaacctggctagcggtgctgcagccaaccaatcactcgtcggatgcatgcgccgagcctggtcaggccgcgtacaagcaaccaaacgcgtcgcctctcgtcgcaattatcttttgacaagcgcacaagatggaggaaccgttttcccgtgaaccaagggcctgttcgcttcagcttataagccggctgaaaagctgaaacggctgatttgttgtgagaggaaaacactgtttggtggctgataagccgactgaataatctgaagcgaacaggccgcaaattgccttgctgacagccacattattgccacattggcagcatccgcagctggttcagtaacacgcactcacacgtcgccactaggctgctctgcgtgcatgctttggtatctcccatgactaatgatatcaagaccctattttacgacagcaacgtcgaggaaaaccaaataggctccgtgcgtgacgtatttcctagctggactctctgtcgggtccaagtccaggattacggaattgacggggacagcgatgccaagtctggacaaactcgtttgtctgcaatggctcacttgcttgcactgcacacacagcaattgcttaaacaacatggcaatcaatcatctttgggggtgtttggatacgaggtgctaaactttaacagtgtcacatcggatgttcggatgctaattaggagaactaaacatgagctaattataaaactaattgcataatcctgtgctaattcacgtgacgaatctattaagcctaattaatccatcattaacaaatggttactgtagcaccacgttgtcaaatcatggactaattaggcttaatagattcgtctcacgaattacactccatctatgcaattagttttgtaattagtctatgtttaatactcctaattagcatccaaacattcgatgtgacgggtgttaaactttaacaccagggagccaaacaggcccaaagtgctttgaacggatttgcgtccatgtactgcttgatcagagatggtccactctacatatatataaaagggcatagaaataaatttcaagacaactataaagagtgcttttgtatcaggatttttccatcgcttgtgctgtatagctctctgcatatattttgtctggtagaatgatcaattgatcatggggttggcttggccagctagaacattctattgcgtcaattgaacctgacaatttgacattgactgtaccatcaatcatggttcatcaaccacttttctgttttcaaaagcaagcttcagagtcagttgaagggtccatgaattctgaattacttgtagttttcactgaaacataggttcaaactgaaaaaaaataattactcctatggctacagttacagagcataattgcagactgcatgttttcatatcatcaggctaaagttacagtgcaggctgcatatttcagatgtagaaatgtagctaacagcagctctgatcctgtcctccatggtgaaccagggcactgcacgagaaggaagaattccccaagggct

SEQ ID NO: 14823 - DNA, 3751 bp, Setaria italica
  Intron number 2 from transcript Si029724m (locus Si029724m .g) derived from phytozome v7.0 (chr-ID scaffold_2; pos 59 15949 to 5919699 reverse strand)
caactatactgttaacaacaatcagccaagcagaggtcagttgctgtttcgatattttcctctgagctccatatagatttctatttctgcataatggaactaaaattcaattagttggggaaaaaagtcaaatagatatctgaagtacaatttaccttccttttccctgtttacaaagcagtctattcactctgaataaaagttctatggcgtgttcataaccaggatgacacaacagcataaacagcaggcctttgttgtgggctcctctgaattccatttttgctattcaagtaacttgacgcacaatatattttttgaactcagttcgtggtaatttgagcttgagttttgtttggccaactgagtgagaagtcatatagtttggacatgttccttgaccttctagaacctgacaatcaattgtcgatgcatctatagataagtgttatgggcttgtattttgtacttattttatcctgcagcatagtgaattcatcatactactgttttcagatattgaaatagaattagttgatttcattcatattattttgagcattctcctgcttccttcagttgagttacaacttacacatagatgagtgattggagtagactgtagacatgtattgtaatcaaattgtggtggtttcattgggccttgcatttagcattgaattgtacactctttgtgcactttaatgtgcaagaaacttttttcttgctaaacctgtgcaagaaacattgcacacacatcttgctatttgtttggtctggtgggattaagatagcatatcctagtgggaagtggatttagctgcctgattatcagagtgctaggaatgatcaggattcactcaccagcggaatgttgtacgccaatcccatcaatcaaagaggcagagctttgaatgaagatgaattaatccagtattgaacattggcattgtctcttccatctggggtttgccttgctatagtacatgttccttggaacctcggatttgccttgatatagttcttgtgccttgcgatttcattgaacactgtgtggagtaaatcaaggacaatgaggttaggacttaggaagcgatctgtggacgatgttttcaacattctggtcaatccagatatgttcaaaacatttgatatactgcttcaaaatttttgtgtgatatatactgctttgaaatttcttctgaaaaactggttccttcaaaaatttgaatttgctacaatttttgttttgcagcatcgtcttgtagttgcgtgctaagtacagtgtttgatatgtgtagtgctgtactgctgtgccgaacaattaggtagtgtagaaagaaaaaaaatgagcttacaatgttatgggaaaataaggataagccatcagcgtttcttaggagtattgtgtatacatttgattgaaagtcaatccactctctggattttcttcaaggatattttgggcgcttttttttcccaatgctatagcctttttgttgtttgttttcacttgttcaaacacctagaatagtcttcaagagacttgacaaagttttagatccgggatggggtaatgcaatatcttttgcataatctaatcatggccaaatgtgctttactttgtgtctaaactttaatatagtaactagtttatctgtttgtgtacatatgcatttcccctttttttatgttaaattataatttagcacaccttatatttttgccacaaatacacacaagtccaaatcttataactattgtatgtaatctagaatttatgttcttcgtcattgtttccttttagccctggatagctgaacatcaatcaaaaccacaactgttatcatgtcaataattttcttacacttcgaattaattatcattagttagtgtcataataataggaaccaagaatagaccaaccagtcaacttttgcataaatctatagcttatttatgatagtttctacatctgcaagttatccaagctgaaagtttatatacctacatttgtctatggatatcatatcaacaatatgaagggatgactaaaaactcacaagactaggaaggatctgttattaaccattgggctataacatgtacaactggctgctcagaggaggtgcttaggaaaaaaacccggtttatttcgcatctcatatggggtgggtacttaggaggcggaggatgctcaagtttgcttgagttccttaaggtgtgttacaagggttggactgcgtgttacaaggtggttggacctatttaagcaccaactgcactaaggagaaaaagtctgtatgcaagtgcttaatgacagttggcattctctttctttaaacactcctgtgtaaacaactcatattgcacattccctaagatgacaaaccaaccattatgctgcctctatttctggacagctgtaccatttcttcctttttgttatttcttatgcaaggaaatgggaaacatcttagttaccaaatatctcttataatggattctttatatttgaagcttcctttgtttgagcttaaatagttaccttaatgacaccaagtggacatcggttagccttggctcggttcctagaatgggccagttaatccttttcccctgttgtgtgagtattttggcataccattttattgtagcagttaagaataagtaggtccaccaaattgtgggatgaacaatccctattcttgattctgaaacatatttctccttggcaaaattcccagcattgtttttttgttgtatagtagaggtaatttgtttgcctatcttgcttgcttattcaacaagatgcagatattaaagtgcaaaagcatccatttagtatttgaaagggcacacatacaaatggaaatgtggtcaatcaatgttaagacaagtcaatatatgctatgtcacctatgcattggaactagagcacatttctggataattggttcttaaaagctactatgaatttctgatagtggtttcaattgcatgtaattgaccgattgaaaatttgaattccttttttgttttttgaatgtgttaatattctggcaataggttagtcttgtctataaaatatttacatgaagtatttatgtaatcacataatctcaatgttgcaacttaaatgagaattttgctgtagttagctattacctccctaaaattgatcagcagtctatattgaatgatgcacaaggcagcatggtgctggaaaacatttcttttagaaagatgatcttaatagttgggtaattgagacatgagccatcttgaactagtgctatagagatgtaagatatatagatttcaaattggactagcagtccctcttcatgcatagccaacctagtcggtaccagtttcagtatgttgtacgaagcatagggctgcttgtcgcaggttagacattccattctgaacatgaacttttcctgcctagttgtggtatggtaaattttcctgtgtcagagaggaaactgtatcaatttgttgttttaaaatgaattggatctgtgcgcactggaacaagtaccttgttcattatattataccttgttcattatattatatttcgacataatctatcatctgtgcgcactggacaagtaccttgttcattatattatgtcgaagcatattttgaggacatctatcgtaactagcagtactaacaatagtatgctatgttatttttgttgcaggtatcacttcctagggagagtattactactatatt

SEQ ID NO: 14824 - DNA, 1112 bp, Setaria italica
  Intron number 2 from transcript Si024794m (locus Si024794m .g) derived from phytozome v7.0 (chr-ID scaffold_3; pos 16 139271 to 16140382 reverse strand)
cataccatcaaaagtttaataggtacactgtgcttgtctcctcattctgaaatcttgagatcttcaaaaaccacagaagtcattcaccagttttttaaaaaaacaaaattcagtaagctgtatttagtagtaaattgtactggattacaaaagtccgatagatcaaatacaaagaatgccatatcactgtgaatgaatttgtccttggtttgctcttggatacgagacagctactattgcatcacagctgtgttaaggttgttgagtttcttatgagtagtagctttctaaagggtatggttgatggttatggctgtatattgtcctgtgatgactttgaatatgctatgctttttcttaatcaattgacattttttgttttttatttttgtttcatgaagttttcagaaagcagatgtgtccccctagagggtgtgggcatctggcagctgagcattattgtgattgagatgtttcacgggggctgaaggctaaaaataggctccagaaaagaaaaaaaaaacttagaaagttaggtccataggtgattctgtaggaggattttgttacttgcatactttaatacatcaattctagaagtatctctcctgttacttaggttgcctaagtacttttaagtattagtgtgtaatctctattcctatttattggtaattgacatattagacagttttaatttcttcatgtaatctgggtatatggaatctgactggttgatgttaaacagttttttttgtgtgtttctctatatctaattagtatatttagctaaggcatgcccagtattttagataaagaggtatgtatgactatgttttttacaatatcgggcactttgaatttatgtgtatctattttagtttcattatttatcccaattccctgagccgacactatctacaactatttccatagcatggctcttaagtttgtgagatgaatcaatgtgtccaagtgtctttagttcacaattaatccagatcaaatacagtcagctaattatttaaacagaacatgtgattcttttacttgatataaatggtaatattttttttccaggtctgttcctactcttcgtgtccaggaccaag

SEQ ID NO: 14825 - DNA, 3532 bp, Setaria italica
  Intron number 3 from transcript Si010919m (locus Si010919m .g) derived from phytozome v7.0 (chr-ID scaffold_7; pos 29 336980 to 29340511)
tttcttctcatactgtttgcatcattgatttacttgtgagtactcatttctttccgaaaatacatgatgcttttccacagtttgctcttcattccttttatagcctactagagtctggggcgcgcctccggcacgctaatcttctgaccaattatgtaaaattttcattaaaaggattgatgttcaacgaactgcaatgtacaacaataacgttaacatttaacacaacaagctaacagaatccaaaatgtgtacaaagcatctcaaattacatggcatatctctttagtggctatctaaacggtctatacaaacacgggatgatcagctcacagaaataaggatgatcaactatgagtacaggacaaatgtgctgcgactattggccaccagaatgtgcaactttgtgcatccaactcatgctgcgaagggatccaaattgtagggtctggactggttctctgagtcaggatccggattcacagaatctgttggctagaccagattgtgtgcctggaatgctaatggcctcaccaagtagcatatactgaatgttacataacaaaaaaaatcaaatttattaccacgagggctgaatgtttaatgaaacactcaccttttaggttgctcattattcacactatgtacactctgacttcccaaaatagttcccttgagtgcaatcaggagatcgagaacaaacaacattagctatgggcatgatgtacatcgaagaaataaaaacatactgcagaatcgatatatgaacaacaaaaattgtattcaagtttttaatctaacatctgcaccgtgactcatgcccaatgctacttcataaatcttgaaatttctgtaaagcaacctcgatgctgtaaagccccatgcattgcctgcataaataacatgcacagtcaatttggatctttgaggcaactggaaattgcaatatttgtaacagagttacctacttttctgaagttaatctctcaataatttcgcccttcaacagcaaagctttcttcagacttcaggtaaccatcattaaggcacaaaacaacaaatgtcatgattttgatagaaactagagatcaaatatatgcaatttattttaacttagttaacggatatttcatccagttggggaataaaactgttgttatgcttctcagcctcaaggcgatctttcaactcacatatgatccttgccatattccggagttcaaaccggtaagcactgattttactttccaagaaattaagtttctctgcataaataaaccatgagagttagtgaaaaatagaagatgaaaatgatccactaatacatatgaaaatcacaaactgatcatgcaatactacaagaagctgacacacctacaaaacctttctgaatcacagtaaccctttggaccttatccttcaagtcacaaactgaaataacagtgaaagggacaataatgcataaagaatacacatcagagaagcatggaaatgtaataatcaaaatgaagttgccagatgatgggagaatgcaagtgccaggtgtgatcataatcatatctacactttccttctcaccaaccagacaatgcacatcacctagtactgttttcactgctggaacttccttttctaccgaattaaataaaacaagatgagaactcaacttctctgaaattacggcaatctatttatccttcatctggattattgattgcatagacaagtagagtcctgcctatgaacatggtacgtggggcaaatatgagtttgtttccatgtttgaaaagagaagttgaggcctgccatatgacaggtagcaggaaaaaaaaacttcaatgccaaggttgtccagtatagttcaaacctttctatccgtagaagcttaacaaaagaacaggaacatcagtgcccacactaaaattccaacagttatcaaggcgtggaaagtttgttagaccagtatgtttaacaaaaaaataataaaaaagccttcctcaagtagtagatccaggatacagaccctgtgtgacctaaacaacggggtttcctatcaagtttgatgtgtcactgaagaagtattaacttccacaaattttttgatgcctaaactatagcccacacttactctcacacccaccacatcatccattgatggccaacaatgttcactaaagcctgcaaactttatttatcagcctcaatttacccacatcacaagtatctaccaatagaattttgaaccaaatagaagctcaacattgcaacactaatctgttaggtccaaacttcccttaaataatgtagaactactatgtgataacgtgtgcacaattttggtagacgaaccccacctctctaagatggtcttctaggccatgttggtttgcagtactgcttgctctccgcatcgaacacccaaatcctgcagattaatgataaccagggtcaaatctcacccatccaagcgtcacttgccatggagagaagcaaacagaacctaaccttggtggtgatggcctggtgcacggaggcgaagaggcctcgaatcccaagaggtcgggaaccagcagcaggttgtgcagctcccactcattaatgtcgatggggaggcccctgctgaagatagtgaggacctcagcggtggtggcggtgccaggtgtgccggcatgcgggatgatcgtcgatgccagggctggccgacgtaagtggccactgctggtggaatgcgtgtatgccggcgtctagggttcggcagggctgggtcatgaggaagcataggcagcgaggacattcgcaggggttgagcggtggggagatggaaagcgggaggagggagggaggacgaatggaagatgaggggcagccgtggcggccgccggggtccggggagggagaaagaggaaagggagggggcggctcggggtcgggcacgtggtgcggcacaagggtggcgggggttttcggaacaacgagcaggagaggaaggacaggagagtggcggtggcgccggaaggcttgagcggcggcggcgcttggagcggatgttgggcaaaggaaagaagagagaggaagggaaagggaggaatgggaggggcggctgcttgggcctgagcacgcgttgcgggacaggagcggtggggggtgttccgcaaaaatgacggcgggtgtgttcgcaaaatcgatgcgatttccgaattttctcttctttgagttgaaatattttggactacaaggggtttctgtaagaaaaaacaaacgtatttactgtacacgagggacctccctggacctggagtcgattgatgaaaagttgaagcgcgttttcgcaaaattgtaggtgcctgcctgcctgcttgtgaacggccggatttccacgatccgatggccgcgaaattgggacgacgtggcccagtcgaatgggcgcggtaggacccctggaatagggggtcttgatatggtgctagtagataatcccatgcttctgtttcctgcagatatcaaactggagcaattacaccttttgtaagat

SEQ ID NO: 14826 - DNA, 2497 bp, Setaria italica
  Intron number 1 from transcript Si033900m (locus Si033891m .g) derived from phytozome v7.0 (chr-ID scaffold_9; pos 45 912775 to 45915271)
aagggcttcccggcgtggccggccgtgagtgcgtcctgtacctcctctttctgctctgctcgctgatctgtggcctcctggtggcctggggtccggggattctggccttccgggccatgggcggggggtttctcgcttagggtttccaggggggttggagaccctggtccctggacttggggctgtgcttcggccggttcggttaaatcttaggttttcccatggtctccctaccccgatttggccattttagctgctaatctctgctaattttgccgtcctgttgctgcatagcacaggggctttctgcagctagggtttcggttaccacacgctcaatatagataggatctttgataaaacaagccccctttccgttactttctgctgagctttaggtagtgtaggtgctgatttctactgcaatttttgacctagcttggttcaattcttggtgatttgtttgttgccggtttcttgccgagatttggtgttgctggtgatttatggcagggggattgggtgggatttggatgattaggtgcaatcttacctgtgtttggatgtgccagtaagatttcagcccattttgatctatggatttcattatacagatatggatttgttcttagtgatctgctcttagtacttgcctggttacaaacttacaagtatagaggcgagatgctctgttatttgtgacagagttgacaggtttccttggtagcttctacatgtgaaattactgattgcctgttgcctgcaagggaaaggatggtttttagggtagacgcgagaactttgtcgtcttgatttttttccacctaaatttgcatatgataatttgttttttttctatactccatatagtagatatcggcatgtggaatgtattatatatatgcttgcttttgttggtactaaagagcgttatgcaattaaaatgagtgttaactcttaagtgttctctcacgttttgttttaactttggatcaaggcaggttaatgaactaataaaaggtggcatcttatgttagtaggcacacaagcagtgtcatgttcagtaacttgatttgggtcttcagagtttgtagagttcttctgtctcctctactgataggatgtctctgtctatttgctgatataaaatatctaatttaatttgctagcacactattgagttttttcaccttttctagttttgctgcccctttctgtataatttcttctttcacttcaaaactcttctcattctcatcacatcgttgaaccgctgcacatgtattctcaatccttgtaagcacagtgccttaattgaacataaaaagctgattttatttcagtaaatcttctgtttggttcctgtgatggaatgtttggtaatgtgtcattcctgtattccgtttcattgcatgaaaaataagtatacaattttttccatcacacagaataatttttgaagttaatttaaacaaaaaatctggccagccatgtgttttatttaaattggctagtgcttgttgctcatgtcaaaatattgcacatccaggattttaaagactacaaaagctggtcctgcatgtaatattctttactacttgcttgacgagtaggagaaaatgtagggcccttattgctgttacttggatgtatgggtttggttagaaatgtgttcgcagagagtgcggaaggccaaaactcagggcaacattggtaattcttaggctccatgcgtgatgtttttgggccattgccagctttgcattggttggtacatgaatgttgggatgcatttaagctggtgtttgctgaaatggttggtatttggggtggaatcaagtgcattgactttgttctgtattttgttgcaaaccacagcctcccacaatttcttacctgaacaaatagaatggattgagaggtttggttgaacatctgtacttgcaatatgttggccattcttttgatgcatagtgtgctaatgatgactttggataataaaacacttacaaatacaatattcttcattgttgaggtgatgatagttagttatcttttgtttgcattctgccccctattacctaaaatgcttagggtgactaggtgcatcccgtcaggactcctgttacatcgatacccccctcatcctgtattcattaagaggcattctgtttactttctgtctgctcttcggctgatgtggacatttacccaagattgattagggctcccaataaattcatttcccttgggggttttatttttaactttagctggtatagcagacttattctttctattttcccatactttaggtctggccactctagtagggggcaggtgctcatgtcagcatgagatagttgcttgtatgaaatttgatttaacatgtttgtaagttaccttttcttgaggaaatatggagaagtctttacattttgtgaattttcatactgttgcagataagtgaaccagagcagtggggccagtcttctgc

SEQ ID NO: 14827 - DNA, 1708 bp, Setaria italica
  Intron number 1 from transcript Si026983m (locus Si026983m .g) derived from phytozome v7.0 (chr-ID scaffold_8; pos 30 821047 to 30822754 reverse strand)
ggtaagcgcgaaaaaggctagagcttcgctgttcttgttctttttgttcctttttcttgtttgaggcaaaattaaagctttgctgtcgtgaagatcttcttttcatgcgtgtgtgtgcgtagccttttgggcgcgcactctcttggattcgttcttgctcacctcttttctggccattttttttaatgtgtttcgcctttcatttccatgccttctctccaattcactcattagttaatcacttactccaagaccaaggggatcttttattcaattaggtactactctccttggcatgttaacttgctttccattaggtttagtagctagtagatactctcgttgctcctacattaacatgatgttctctatcaagaaacctaaatcatatacatgttttgttattagcatgcatgcactctctagatatagcacaccctctcccttcaaattaaaaacaaataaaatctccctccttcccactatctccttggtgccaccttgctgtaaagcaattaagcaagatgtacaaatccttaactaggtctaattttggagaactgggaagcagctgctagaggcctagagccatgcatgattctgttaagttgttggtgagattcctcgatgtcaatggacatccatttttctcaaaaatacgcctcttgtgaaattactcctcttccctcttctccctagatgcatgcatgcaaaccattccagtggcatcttgcttgcagaattccattctgacatatctactccatcctccccatcatgtcctccaattaagattaaacaatttcttgtccacacatgattacccttcccttttccttccatccccagtgaaacaataagaaccaaagaacatttttttcttacaaaaaaagaaagcaagttctttctctctcctttgctatactaattaaatactaaaagcgggttttctctaatttaaaacagtattattgtaagttaataacccctgtagctagatgtagctagctagctgttcctttaggaattaaatcaaactaaccccagcatccatctctctcatggatcgatctggcagcagtcttgattcagtcttcaccaagacaccaaccaaacacaggcaaacagcaaagcctttcgtcttccctgcactgcagcagtcctggcgcccccaccaccctggcagcagtcgtctggtccagaaaagcacacacgatcacgatcacgatcacgatcacgatcccattcactcatcaataatcgtacacccacacgagcctgcagcatacgacacccacttcagtgcagggagaccacgcatagcagagaatctgtccatagagcttgcaatgctacatccaggtcacaaataatacggtttggtctcactcgcttaacgtttaggacaaccaccatatgctccccctacagctacccagcagtagccatctgcatgcttagaccctaaccacacaacgcatggcacgagagctgttctctcacatcccaatctaagaatccatcaccacaagatatggtgcatagtactggatatatattatatatacaatgtatatgtatatatgtcatgcgaattgaatgcattgtacctggagttattacatatggtaagttcaattctgacgatgagaatgtatgtgcttattctgtagttgtaacggcggcaggccggccgatccgtctgcca

SEQ ID NO: 14828 - DNA, 2698 bp, Setaria italica
  Intron number 7 from transcript Si010093m (locus Si010093m .g) derived from phytozome v7.0 (chr-ID scaffold_7; pos 20 313616 to 20316313)
cggaggtgctctcccgccgggagtacgacggcaaggtcagtcagtctccatcttcgtcgtcagatcctcccctcctctctctctcgctccctctctcgctctccctgtgacgtagcagctgtgggccccactcgcagtgaggatactgtctcgcttgtcgcgagcccgcgcgcacgtgccgcccccttgaagtccacgtaacaacgggggcctcgatgccaacccccacagtccacctgcacccagtccatagacgagtccaaccgtgtcagcaactggacccgccttgtcatcattaagggtctatggactaggtccaccgtccacacgtcgtgccaccgctgtaggtctagtagatctctggagtctggctgatgatggatttgggatttgtccgagatagagatttgcttgcccgtggccgggcagacagcgtgccctgccgccatcggtgggccccatcgaggcccattcgtgtctgcctctgccccctccagtgcatcgtgattcgcgacctagcagtgcgcgcgccgtgtgattcggcttcagggtacgcagcacacacagcagggcgtgctgctctggggctctgggctctggctgccgagctcgggccaccgaacaggctgtgcgatgggcccggagaccatgctgactcacacacacagtgtttagtgtccactgtcacttgctactgcttctgctcctgttgttgatgctttacagattcccaggtaatgcgatctggtaggaattagtagtgagcactagtaccccagtggcttgagttgaaaatggaaaaatcattatcattctgaaaagcataaagagatcacgcgaggatatgaatgttccttccggtgtgacctcgatttggacattcacattctcatttttctccggcgatcacataccatgcttgatctgctcgctccaccagtcaacctgcttttcccctgcacgccatgctcagccgaaggtggggatcgagaggttaaggtccattggattcagaccggtgtttgagggtcaagaatttgtagtctgtacgctcctgtcactcctccgcttgctttattaaattgtggcctgaaagaaaagttagaccagctggagaaagcgtgagattctgtagatacagatattgtgctacttgatttcggtgaggttgaaggtggcgaatggcgaggttgaagtgtgacctttttgtataggcgcatgcaacattcaaaaggtcttttgtttgtccatcgttaggaatttgaaaggatcggagcaggctaaggaaattaggtgaatccatgctagtgactagattgttaggataacacacaccactgaggtgcttcaagttgggcaactcgcggtttttgcttgacaagtcctctttttaggttcaattcagactttatgtccttttccgagccattttgccatcatggttttagtgctactgaccatctgattgattttatcataagaggccctcaagcccaatcgttttcaagcagtcatgttagactgaagctctcttttggcctcttgtggtcctttgtcctactctcctttttatttttctcattgtcagctgtcgcaaacagtgattgcattttgttcattgctatccaagaaaccatcagtctacttgcacttctcctttccagcactgcaaaattgtttgcatttgcttgtcagagataaatagctcatggatagaatatcaagcattttatttaattgttgatttctagaaccccttcaagactatgctgagaccaaagtggcatcgatccgcccaaccgtatggcgcccacttctatgtcataaagttctgtgctttttggctgcttgtgcattaaaatattgtagtgaccgtctttagttttctccacgtctaactgatttttgttttcgtggattttacttccctgcctgcagcagttcttggaacagatgcttgagaatacattttgttgggagttcagaatgattcacagtcgttagctatttctttctgaaaagaaacacagcatagatcctaaaagagttatggttttaataatttgatgcaaaacgagcatgtatactccttaactaccatatgactcgtgttttcttttgcaaaaccctgaactaccctgcagcatgaaaatctgtggaaaggccgtgtggttacaaacttacaatgcctactgattctctgatgccatctttcatctaccctcagaatataaccatcagcctaataacaaaacctcatctgaacattttacatagatgcttcacagcattgcttgtttttatcttagctgagttgatataggtcaactacgagatcacatatattctaaagtctactgcaaatgtaacatagctgaagttttgattgctttgaagagctcttgaatcttctacgcaatatctagaattccaaaatagcaccaaatggtgctaaagaaccatcatttgagtgttcttttcattagagggcctgtgccataatagaatagcttctgaagattatattgacgaccataactgcatcttaatatcctactggcaagaattgttttttagtaaaaactttcttgctttgtcattgcctttatatttatttacttattttgtcttgacatatttgcaacatttcattgatgtttcagtcagccgacgtgtggtcctgtggagtgacccttta

SEQ ID NO: 14829 - DNA, 4895 bp, Setaria italica
  Intron number 5 from transcript Si039634m (locus Si039634m .g) derived from phytozome v7.0 (chr-ID scaffold_9; pos 14 798960 to 14803854)
gagagtttctgcttcctgttggtattgtcctcaaggtataatctatcgacgtttccttaagaatgcttagcatttctaaccagcaatacaatccacactgtggtgctattacatgttctgtatggatcaatgctatttagcatggccggccttttcatcagaagcaccctgttagtgtcgtaccctcagcatgcattatataatgtagcaactgcctataaagagaccttgagtcctctgttgatgcatgccattttgagctgttgaagttgaattgtgttgtacaaaatcattaatccacagacttattttgttctttgccctaaggttatcaatctgcttgtttcatagaaagtaagttagtgtatttctatctctgttcccatcttctggaaggcttacaatctttccattgaaataggtatcatgcactttgcggtgtagtgtttgacttgtcacattttttgctcatcatgctcctatctttataatattttagtctagattgtattgttaatgttgcttcagcattgcactgacttgattatgaattttcaatgacaggcccttattgatacaagtgaccgggaaatctttacaagcttgacatgctgctacagtgataaatatggaagaggaaagggagttgttagtactcaactaattggtgaaagggcacaaataattcttgacgaagtcagagacctgtcccttttgactcgcatgcaatgcttggtgcatattggtactttaaaagtttaaaatttttccgtgtttaaaaatcccttgaatcccttgtatgttttgacattgatgatcttccaaatgcaggaaagtacttccgatctgtgatggaaggatttgaacattatgactatgaaacggtaatgtgtaattttgtagtgtttttattggcatatgctgatggatcatggcttcactttcgccattctgcattgtttaggttgctaaagcggttctgaaggactatatctttgtgcacctggaaaacaaccacgataaatttaatctattgatgtgagtttaaattttagtacctttttttgtgtgaaagttttatcttcttaacctcttttatcacatttcctgctttagatttatgctgcagaaactttatgctctcgtagaccaaactgcttcgcctgacaatgctgacgcactacaattccaggaggctctcttgcctgggcacttaatcacaatttttctgaaggtaactgaactttctggtgctttgcatgtgatttttttaaataacctcgaagcattgtaaaaattgcccatgtaaaagtttattgcactgtaaaacaatccagcttttggaatggccatattatttttctttctctcctctatcttcttttccacatttccaagaaccagtgattagttgatgtttgtgaatgtgggatgcaagatattcattctaaaacttcctggagcgattgcagccccttccttgtgagttttaggtgctaagaatggcccaaaatcagccactttgtgcaccttttccacaaaccccgccatctttagctgctgaactgatatcattcatgtacatcttgctgtctacattatattttatcctcttttcacatcatccaagatttaggataagataacttaggtaagaaaggggtggttaatgtggttggaaatgaagattggagaacgtctacgttaatgctgtaatgatgttatactgttatactaaagtggcacttttgccatgctatcaaactttttccccatatttatttcatacttggtgctgtttctttgtttttgatacttgaccgaagattagtgcaaaacatgatttcttaacctcaatattgattttttttcattattcgattttgttttgtgatatctgcaggatagacttcaggattggctaagaaagtctaaacgtttaatcattgaagaggctacaaagaacaaaagttttgatctcaacaatggtatgctactcttactgtttttaggccaaaaattttagcttatgcactctggtattgtgttcctcaaggcaaaacagttgaattcactgaaaaataaatagaacagtgattctctgcataagaatgatgatgatgatgatgatagtaatagcagcagcagcagcagcagcagcagaaatagcaacaacatcaaactttggccgtgcatagacagctacagataattgcatttgcagctgtatccccactaatttgctataacatcatttgtggatgtggtgatatgactggggggatgatgaatacaaatagtaagggtctatgtttggctttggattctcgtaaaaaggagagtgcaatacaatgttttgagaggatataaaaatggtccttatctcccataaccattggtaatacaagaattgaatactatctttattctttacccctgctgttgaaatatgattgtgatattttcacatataagagaatttgttcttttttctaacctggttcattcaatgaaaagggataagaagaatccactgtgaatgagtgcaaatactgcggtagttctttattagctagaaggaattaagtgacatctgctttgaacagcgttgaaaatcttgtttttgaaggttggggatttgagatgttgatatgagagcatatcggtacgtttttttttaaggtctcaacttgattcctctttttgtgagccatggactgtggtttaaatcacagctagacaatccagcagtcttgagaatgttgtcacctgagaggctgagaccctcctgcataagatatatttctatcatgtgggttgaaatggtgatacatgttgtatttgaacctggggactgagaggtgtgagcatggcatttttctgtatattgtggttattctgttcagttggataatgccataaaccgagctaattgaacactgaataataaagtaacatgattgctttcgagctggtcaaaatattgtcgaccaattaaatttggtgtactgtggttcaattagtattttgactaccgattaaatttggtatactgtggttcaattagattgtttacttttccagtttatctgctcacatgatcagtggtcttcttctctatttcttcttgatgttgtgaattcttttgtgcagcactggaggtaagaaaatttcttactaaacatacaacatttgttggtagagctattgagagtatgataaagatcgggaaagtgaattcacaatcaggattggatcttccacaggtactctcttacaaggcctactttattcatataagtaatactgcttacttttaaggcatcattttccttgaattttattgatgacatcgcttctttttcgtttgattaagagaaacccgacatgggttacaaagtatactacttgttttttttttgtaaagctgaatgttaacaatatgttatgcatctgattttgctagtgtttatattttttcgcagaatatttggaactaataatggcttttgttgttgaatttgcagagagatggaatgaccattcatgctgaacggctcaactttcatcgctatatctcacatttccgttctgttcataggggttctgcttttgctaaaatgcgcacaacatctgttagaaagttacttccagagtatgttatcctcttgatgccattctgctgttgtttccttgcatccatcttactgaaaatgcccatgtagatcctggggtttcctgtgtccagttcatacacctgatggagagccttgtggtttgttgaaccatatgacttccacatgccgtaagatattctcatcttgtcatttctcttgaattcaaatctgcacagcaccccctaaacaccacctcctttatatcctggatttcttgtttctctttcatctttcacagcatattacatctgcattttctgtgtaaatgtttctatacttgtgtccttgtcttttttggggacactgcacctaaaattcattgttatcattttcttagttccagtttatatttggcgtgtcaggtatttcatcggtctacaactcagaaggtgtggttaaagattttgggaaaataaagaagtcactttcttttgagttggttcgtgttggaatgaaccctgtgttgccgaagattgagcgaactggtcccccagaagtactacatgtccatttggatggatgcattcttggtactattgcttctgctaggattgaggaagcagttaattatcttcggatgttgaaacttctggcacactcaggggtctgtacactatgttattatggttttatttgattggactcgtattttgaaacttttaccatcgtgttctagctcagggacatgtttaattttttttatcagattcctgaagatctggaagttggttacgttcctcttagtcttggtggagcttatcctggcctttacctttttacaaatccagctagatttgttcgacctgtcaaaagtctttttggtctacctgatggaaagcaaagtattgagcttattggaccatttgaacaggttcgttttgaccaatttctgtatttcttatattacttctaaccaataacccaaaacttcattttgtattctaaattaggcatttatggagatacggtgtcctgatggtggggatggtgggagaaaagaaaagtttcctgcaactcatgaagaaatccaccctactgctattcttagtgtggttgccaatctgacaccttggtccgatcacaaccaaagtcctaggaacatgtaccaatgccaggtcggtagtcagattttgtttttatagttatcagtttattattcttgatgatgggtaatgtgcttccttttgtggactaaccaatcctcatgcctgtttccag

SEQ ID NO: 14830 - DNA, 14852 bp, Selaginella moellendorffii
  Intron number 1 from transcript 20225 (locus 20225) derive d from phytozome v7.0 (chr-ID scaffold_148; pos 232450 to 247301 reverse strand)
tcacgctttgcatccgcagtggaaagatagcttctgtcaaggatttgtttgatcggatgcccgtgaagacgatcgttgcgcagactgtcctcgtcacagcatttgccaggaaagggcatttgaatgaagccgaggctttgtttgagaacataaaggaggagcgcgatgtagagtcatgggcttttggctctcgctgtctacagacaactccaaccgaacagcaaatgcaggttgggcagtctttttctcttgagttgatacaaacgaagactttctggcgacaggcaactgcatttgaggtgaaaaggctactgattgccggaaagcagaaagaggctttacgggctgctcaagacgggcaactttggggatgtgctcttcttatggcccggcagctgggagagaaggtaccttgtcttgtagctttgatgtatagactgttagtgatggtcttgtggtttttaatagttctacactgacactatagcggagatggctcaatgtcagtttcaaccagggtttcccctctggactctaactcttctttatgctggtcaacatgccggagtgtttgtagggaacactaatttgtcgaatgtaacagcgcttcaacctcaaccggttccagcgtctgctgtagatggtgcaacacaggtgaaatacttttatcaagctactctcttgcttaaggagtgcatgttgacttgcaggacgcagaaggaatgctcgaagaatggcaggaaaacctggctataatggcagctaaccaaactaatggggacgagagagtgattatgcatcttggtgattgtctctggagacatcgagatgaggtatatacatggtcacatgttgatgtttctcatagttttaacttgcagatatgtggagctcaattcacttggttattccatgtgatttttcatagtcaactttgtgtatgagtgcataggtggtagacatcatagagttaactgaacaaaaggactacgcactttttgggcatataaaccagatgcttggagttattttctagagggtttaagttcattttcttgcaatgagattttgaagtttaagctgaaaacatacttggagtgtaaggaggcagtgcagtaagttgcctttagtcactcgctcatggaacaatatcagcaaccgtatgctggtaactcggataagaataagaattctgggaataaacaaggtgatcggaaacagagggtggaaggcaggttccactttgggggctcacaaacaatggttaacaaaggtggtggtggtggttggagaccaccaacagtttcttttggtcctaggccctatgttcctcctcctggtgggtataagtagcagcaacctacaaaacctgctcctagtggaacgggtagtgtgggtcattgcttctattgtggagagtcaggacataggtccttggaatgtcccaacaagcataagacaaagtctcgtgttaatattatgagggaagacggtggtgatgaagttaaaggggttgacgagttggtcaatgtagactatgaggaagaggaggtgagtaactttcattgctttcctcaagtttttcttgcagtcaatgcaaacactgatttgttaatgtatctggtaggctttgtccgtggacaccgaatccgagtgatggttgacacgggagctacgcacagcgtgatatccgaagacctagttaagttgctaggattgaatactgagcaaatgtcgcctatgcactttcggtttgcggaaggtgggcaagtagccagaaagtttgtgagtgatgttctaataaagatatccaagtggaaagaaagaatggacttggttgtgttgaagatactaaattttcagatggtgtttggtatggacttctttaacaaatatataaaagggatttatggtgctaaacaaaatcgtatcacgttgaagtccgaaggacatcccgatgtgtccttccagttgcaaaagcgttcctcaaaggattgggatgcaaagtttctgactgcgagggccgctcaaaaagcagctaaaaggggatgtcagaccttttgggttcaagtgatagaagctaagggtgttggtgactcaattcgaattggtgatagggttgatcctgtaccaaaaaagatattagagttgttggtgaggaatcaggatatcttcccaaaggatttgccgccagggttacctcctagccgtgaggttgatcatcagattgaggttattccgggttctaaaccacctacaaaggctccatatcgattgaacattaaggagatggctgaactcaagaagcaactcacaaagcttcttgacaaaggtcatatctgaccaagcaagtcaccttatggagtatcagtcctttttgttatgaaaaaggatggaaccatgaggatgtgcattgactatcaggcacttaacaagatcacggttaaaaacagttatcctttgcctcacattgatggcttgtttgaccaactcttaaaggctaagtattttatgcgacttgatttgcaattcgggtatcatcagatacaggtggtagatcaagatgtggagaaaacagcctttaagactcggtacgaatcttatgagttccttgtgatgctattcgggttatgcaatgctccggcaatgttcagcactatgatggatagaatattcagagattattttgatgcatttgttgtcctgtatattgacgatgttctagtctttagtgaaacgttggaggatcatttgaaacacttggagctggtgtttcagaagttgcgcgaacacaaactgtatgctaaagaaagtaaatgcgcttttagtcaattgcacataaactttctcagacatatagttggtggtggcgtgattgaagttgatccaaagaaggtggaagcagtgaagtcctaggatgtcccgaccactgtatcaaatgttcgttcctttcttggtttggcaggatactattgcaagtttgtccgcaattttgcaagaattgctctttcgttgactgagttgacgaagagtaacattccatttcattggacaccaacttgttagcgtgcttttgtacggttgaaggagatcttgactatcgttcatgttctcaagatcccagatcttgataaaccctttgaagtgcattgtgatgcatctggctttgctattagtgccgtgttgcagaaagattgtgacaaagcggttggtgctacgctaaggcgacatggttgtcccgttgcattctattccaagaaattggatgagacccaatgaagatggccaacgcatgagaaagagatgtttgctatagtgtcggccttggaatattggaacactacttgggtggacacaccaaggtttatacggatagtaacacactaagctactttgctacgcagcctaaacttatgccaaagtaggctcgttcgcaaaagaagcttactagatatgatattgaaatcatatataaacctggtaaagctaatattgttccggatgcattgagtcgtcaggctcaattccgggcaatatcagcaatcagttcggactggttggaggacgtttgggcttcgtatggaagtgatccgttggcgaaggcaatcttataccatgtggagttgtcgaagaagaactctagtagcgaggcagtgaaagttgctaaccgcactaatgcaaagcttcacttctcagttcgggatgggcttatattctataagcaagaaagattgtatcttccctctaaggatttgcagcagttgtttctataggaacatcatgatgtttcggcagcagggcatggtggaaagcaaaagactctagcttcattgaaaaagggatttttctggtctggtatagaaggtgatgtagcggactatgtctgtttctgccctatatgtcagcaatgtaaatgtagagctaagaagcaggctggaaagttgtagtgcattccaacaccggcatggctgtttcagagtgtgacatttgatttcgtcacatgcttgttgaagtctaagggttatgatactttgatggtggttgtggatcggttgtcgaagattgcacacttcattccaactgtgggaacaatgaatgcgaaacaagcagcaaaactctttttccatgaagtagtgtgactttgtggtcttcccgaagagatgatctcgaatagagattcaaggtttatggggaagttttggggcacactgttccagttgttttgtaccaagctgaaattcaatacggcttatcatcctcaaactgatgggcagaccaaacgcgtgaatgctcaagttgaggattatctgtggtactatgtcgcggcggaccaacacgattgggttgagtatttgaatacagcaaaaatttgttaaaacaacacatttcatagcactattggctgttccccgtgggagatactgcaaggaaatgctcgtggagtgcctcaatagattgttataccgaaatcaatgttcgaagtgttggtcccagccgttgagacttatgcggagcagctatgccaaggttggtctagagttactgaggcaatgggcaaagctcaggataggtatcaacgtgataaggatcagcatcgtcgagatgtatcctatcaagtgggagatcaggtgtggctatctttccagaacttgaacattaagggatctttatctcggaagctgttattgagatatgttggactttatcgggtgttgaggcgcattggtaatgtatcctattgttggatcttcttgcggagatgtctaatattcataatgtatttcatgccaatctcttggctccatacactatggatgatgcacgtcaagtggagattcgtccaccaccaaaagttgtggatggtgaacctaaatatgaattggaagctattttgggtacacactggcttaagcatgccaaatatcgagagtatctaattaagtggaaaggttacccatcttgtgaatcaatttgggagcctcttagtaatcttacacatgctcgtgagcttgtcacagagtatgagaattgtaataaagattagcttttgtaaaccttgtaataaatcttgcaaattaataaagtaatatatttttatacatcaaagtgtcgtttctttcattcattagtacttgggtcagttttaacaggttgacttcggcacttcagtgcatgggttcaatccataaccatggggataactattatagactgatcacaagtccctgtctctctctcgatgactcattttaaaaaaggggcatggtcgtgtaaacaacttaatctgccagtttatagtagttgtctaaatcttcctgacggggttgatttcttgctcaggggaagttgggcctctggctttctccctatgtccctgcgagcagggatgtatcattcctttgtaagtcgagtggtactcggatgtagcacatgtgatcatgggatgagatttagatatactgtcaccgtggatccttggaaccttgggggataaatggggataaaatagcactaagggctctctcatcaaacaattgcctcttttttagttggcttaaagggagagagataaggtgtgctatatcggagcagcaaaggtggctaactccgttagttatttctttgtcggtgatggctagagggtgtctgagtcttaacgtctttggacgtagaggagaggtcattctataactcatttaagtcggtgcgtttcccacatagtgtgctttccgttaactttcagaattgtttccttgacaatttgctagactcgggtatgtatcgacgaggatgttgatcttccccaagggggggagagtgtcatgaatgtgacttcaggtattgaaagatatttgtcggctagtccttacgggcactctttccttattaccacgacggcaggaggttggtactgctggtttcctttattagcccctcttgtccaagtgttaataaattggacctagcatttgtacttggccggatgagcataaggaaggaattcataaatgtctatttagccaagcatacttggcccggcttgttaattctcttttgctctgttttgcactggcttggcaagaaccctcgcgtattgagactagtccctcaatatcgccggatgagagcatactgtgttttccaaacaccctcgctatcacgccctttgtgttagtctcatttcggtcccaaatgttatttatggaaagtgtctagattcgctcatatgtatatctacagaatatagaggttggcctgaacacaatggtgttcgtcccgtgtccaaattcgcaatctagcgccattctatatttagtaagtttcgagcttgtcccagagactaactcctagtactaagggaggcttggggtgaaagcccaaagcgtgtcttcctcaaggaggtgggggggttccaaatgtatagtagggatagtggttagaatgtatgtccgaccacctgagacattagtttagctcctgttgggctgtgtcactccttgttctacgtccggcttgggtttaagcctaagctttacactcctttagtctgtggggtaccatcctccttgcgttaggccaccggtatgctaaaattgtgccagactccgtctgacaccattttgcatgcaggtgctggatacaaggagctggtgctcatgggattgtaccagacccttgttttgtagcgcaacgggcttggagtttggctccaaattcatgtgcgttacatttggtatcagaggaattgtctcagcgattcctattctgaatactaatacaagtcatgggcaaaagcctaaagcatgtgtctctcggggggggagaagggttgcaaggggttccaaaagtatagtagagataatgaggtccaaaaaccaatcttgaaggaactctttaatgatgcttctaaactgacttgaggttgaggctagagcttaggggccttgggtgggagtgagcatggacttaggtggtgctggagggaccacccaaggaagtgctcaaaagtagctcccactcccaaaagggaaatcgattgtagtgcttccggctcaagtggagtggtgccccacttgagtaccttgcggctcattagtcctcacccttcctaagggcttaggcctttccttcgggatgaaaataggggagtaggggtacccatattgggccgttaagccatagtgtttccacccagtgtctcaaagcaagtgttgcacttatggcttgggatttagagggtctcatgattaaattttgttataccaatgaatgttagaaacttggaagcttaatatgcttaatttcttgtgtttatggggagtgtagccaaaccttaaatttagtttaatttggggaaggggattgggagagaatttaggaatttgtggttgaatggctagcgctccattgcttgtgtagtgagttgttaaaactgtaagctcctgagtttggacttcccgggaggtcacccagcccagtactattcacaccgaaggacacttaatcccaaatatcccaagacccttaaccgattggaaaagggggtgcactcttgtttgagtgatgcccttatggctatctaatgcaccaatgatgttctcgatgttgataaaatacatctttgtaccttatttggatcattttgtggtcgtcaatgcaaaaatacatctttgtaccttatttggatcattttatggtcgtcaatgtagaaatacatctttgtaccttatttggatcattttgtggtcatttacattaacgatatcttaatctatagtgagacattaaagaaatatgctaaacacctgatgaacatgtttgagaaactaagggaacacaagttatatgctatagagagcaaatgtaacttcaaccaacaaaaggtaaaatcttttgagcatatggtaagcaaggacaggcttaaagtggatcctaagaaggtttaaatgatacaatgactattgaacatatacgagttaagggcatttttagggctatacaactactattgaaagttcattaaataacaacattctcggcattaatgtatcaaatctttgtaccctatttaaatcactttattgttgtctaaattgatgatatcctaatctataatgagatgctagaggagtattccaagcacttgatgaatgtgtttaaaaaactaagaaacataatttgtatagtaaggaaagcaaatatgattttacttaacaagaggtaaatattaaataaaatttactactttatatacagctaggttggatagcctattataaaaacatcattttttttatcaaattaaaattgaaagactatacgtagaagggtataataaaaactatgtaagtttgaagtatgtacactcattgatataaggaaataacttaagttgaaaataatgtgattttctttatgccaaaatcataggaaaaagaggatttcatagtctatgaatagaattggatttgtatgattttatgtaaatttcacaatcaatcattggtttcatagatcataaataggtaatgaacaatgaacatgatatttggatgatattcattatagtttgtgtcatccacacatgagccatatgaattccctatttttttatcaaaaaatctagattgttcaattcaaagtaaaaattcaatcaaaccatcaattttaacaaacaaagatctattgctggatgttcacaccctaatcactgagtctggcatagtcctctaaggcttgattagtctagtgagtagcaagcactagaatagcaagcaaagccatctccaagaaaagaaacattaaagaaaataatatttgcatcaaaatcaacaaaattttattatttgattgttagaattctttgtagtagggaaaatgaattatctgcaactaaaatcttgctacactcactgaatagcaagtagagttaaactgttggagtcatggttagaattgtgaaaggaatcacattcattgacactgcaaatggaggagagattgtaatctgcagcacttggatgttgtctctaaagtcttatccatccttttgcaaatttccctagggctggattaataatggagcactatggccagcactctagagtaatggagtgccataagtagtgctatctagcaactaagtgtcttgggaaattgattgatctaatttgtgattggcacttagtttgaaccatgtggatttgtgggctgttgtgaatgtgatttttggtatcaaaaaatattttttggttaatccttatcaatattctctccttattactatagtggcaatataaataatcaaagaaaacaacttgagaaactatctataagggttcaaatataaaaggaaagggcacatgaacaaagtgtaccccctttttaaattgattaatagttttgggacatttattgttaaccatctttaagtttgaatagtattgagttgaatgacctctcaagaagtttaaattcagaagcttacaagcaagagattagtattgttgattccttttgtaaactaattgagaaattagttatcacatgtgcacttgaccaaataagcataaagatgaaattcctaaatgctattagtcaaacacatttgacctgattaaagaaactcatttgttaactatagtattgttctcacatcttgattcacaatctagttttattttatatttaataagttttcaagcttgtctttgaaactaacttttagaactagggcattgtggggagttttaaatgtaataaagatagtggttagaagtatggtagagcatttaacacattaatttgtcttccactgggttgtgtcattccttattctaagtctaatttgggtttaaccctaaactccatggtactatagtcaatagtacccctcatgttaagccattagtatgccaaaattgtactagatatcatttgacattgctttacatacaagagctagatataaagagttaatgtttataaaaggatattgagtgtgtattagaccctcgtattatagcacaataagtttagagtttagcttcaaattcaagtatgctatatagatgtagatctaggagattagatgctagggcagagaattgttgaggcacaaccatggattgcaagtgacaaaaaatgttgcctactataggtctatagccctcttgcatacttatcaatttttgttttctcttggaaaactcctcatataagggattgtgtaagcacaagaacaagagctcttggggttcctataggacatggctaccaagtctactagtgattgtgcagtagatgttgctcaggttgcaaaaccattgggtcaagaatattgtttcctagcttggatactatgattaaaattcattttaacttaaacttaactcaattagtaaatataattaagatagcctgttatacatttttcttctttatgtatatgattgatagatacctcactaattgataaggaaattccttgtttgtactgttgtattgattgggaaatcacaacaattctatatggattgcctctctctaggcatgagacttacattttaacatgaggttaatgctcaaggtttagcttagtctttataacctttataaatcttttgaataactacaaacatagtttattagtactatggaatataatttataacaattattttttatatttttgtcttagttttacctaggtctgggtagtaatattagtgttcttacaattttattgttctatattctaagtaaagcatatggcatagtaattctttgctaatatctatattaattaaatattaagtaaatttatttatattctctttctaggtgcttgagttcaagagtatatacaattgttttatttctaggttcacttttttgggtctgagtaatatattaatgttcttagaattttagttatatttttattcatattctaagtaaacaaataaaaattaaataatgattcccaaattaatgataattaatcctattaatttttatttactgtttttttagtctaggtagtaatatattagttttcttaacattttaggattcttatatcccaagaaaacatactttacatgtaacatctaattagtaaaattctgttttagtaattattcttttatatttttggtctggagtgtactaaatatattcatattctaatagctataaaaaattaatattagaaatttttattttactttctttttggttggttattaagaattttaaaatcttagtgttctaaatatattcacattcccaggtattacttttattaatatatttatcaataatatttatatagtcactttaggaatatattaatattctaaatatatggtctatgctatatagtgtgtctagagagagagagaaagatcaaaagtgtataaaattattaatttttgtacttattcagaatttactaggcaatactactctattataaacaaatcacaaacaaaagccataccataatatcaattgagtgttagtttttaattttctcatttcattaaataaagtacacaatagaattttttctctattgttacaggctatggcattgggcttgtaacccttagcaatccttctgtctacttattgatagctaacattttcaaaggctccacaagttaacatgttgatacaaactgatgaaaaatggcccacttctacataaagcaattctccaaggaatagttcaaacattttgaaaagtgatacaaattaaggtatttttcgtccactaccaatctcttttggctgggaaaaaaattagatctacacaagctatgtagaaccaaccaacatatattttttcattatattgagctttgataaaaaaggtgagctctcctattgattaattttgtgattaattggtttccacattttcataataaagttgttaataatgaggagtctggtgtatgctttaactatcattatattaataggatttttcttgcatatctctagcatgacaatcctggatgcttgacatcctgggcaattttcccaattggaaacaaggaaagtcacaagtgctatttcttcttttatcaattctcttcaaaaatttgctttttactctgcggggtgaagctttagatataatattgcaatcacagataattattatgttactatacatctttggttcttcagtattgctccttcaatgatagccatcacttgttcagtgtctcctgacgagtctattgcactatcttctaatattatgagatatgaatatatgcaaattcttaaaatcatcatcccccaagcacgggtgaatggttatggaacaatgttagttatatctaaactcttaggaattgattatgtttcatggcctattgacaaaagtgaacataatgaattaaacacttataataactattggaatatttcaagtccctttcctccttatactccttcaatccagccctaaattactcataacaagagttattatcaaatccaagattggtattcagatttagaagattgtaggccttttgaaacaatcataattagtggttttaaatccttgggatcatttgttagtgatccatatatctttcaatccaagaatgctaggtatcgatttatcatacaggtagattgcaattttgtcctatacgatatgctagatggagaaagagtgttatatgaatctggcatttatacacattctccatgcccaatcaatattctttacaactcagatgtatatattggggacaagatttttgttaaggcttcaaatattgtaaaataaaacctgattgtataaaaacagttgggcttgtagtagaaaatgatggttatattatattatggtcgacagacttacaagcagctttatggaaagctcctcattaagtattaaaagactctcaaagcacattactataggtttttatggtagagagaatatagatgacacgatgaaaagaagtgagtcaagataattgtgcaataaaatcttgcaagggtggtagaagaattttccataagcgataatggcaattatgattcatgaagtagtaagatttaaaaagtgattttgagataaatgatctacatgcattccaagttgtaccaaagattgcaaacaaataaagccacaagttcgagcttagaaaactaaaggagaccactcttcaagtcataaatattaataaccatgtcattagcaccaagatgaaggcttgatttgagaagatgcttaaacaggagcaaagctttcaaagaataaatacataatgatgctagaagggttttcaaagccttttgtaagttcctatgaagagctacagcaaataaattgtggtggaaaatgagattccaatcaaacaagaagcaaagttggtgacttgaaagtcatacatctaaaattttctcaaatttgagtaggtcttgatgtagaatacataagaacatgtgggtcctcagtagattacaccagcttcactgtagtatatgtagacactcaatctatttttccatatgctcctttgttaaagtaatgttaaatcacatacagatggtttatattgagtgtgtgagcgtggaagaaacttgaaagtgttcctcatcaagatatagtgttaggcggtggcaaaaagaagctagtcaagcttaaactttgcaatacaagatgcttattctcactccatccatccaaggtcatccagttacatttgagtctttcttaagagcatagattagataatatagatagttggactaaataaaaagtgaaagaacataaacacaaaacaaccaaagcattttaaatcctaatgccatagtttcacaatttcagtatgccagtaatatgtattccaccaacaagcatggcatgacttcaagttggatttctggcctttaactttcttgaaaacttggcatcccacccactgatcctactccttaacattgaagtaaggaaaaaaaaaagaaaagaaggtttgaattgcccatcattcaatgttacagtgatggccttgtccaacccatactttccttaggatttcctcaagatttaaattactttaagagttaaagtgacaatatattcaataaactgataattagggaaacaatttcatttctaatattgttcagactgtcatactatcttatctttaaaaattatattggaaaaaatggccatttccaaactcctgtggtcacagtgaattaaatgcttctgggaatctcttttctcatgattctcaaattatctataatagaaatggtgttcagattttggaagattgttggcctttttggagcaaacaaagaacaaagttgatgatcctgggaaaggcgccagtgctcttttcttaacatctcaagcatgctaattgtgcttctatcagcctgcaatcgtcgagaagaaagctttgatcttgttctagggctcttgatggagaatgcgaggagggagagcgatccttcctcgcagttcttggcgcttcttcgatcgtgcagggaattggagcaggcggggcggctccacgctcggatcttggccagcgctgagtgccgccacgacaagctcctcgccaatttctgcgtggagatgtatggcaaatgcgggggcgtgcgcgatgccaggtatggtttcgatgctatccaggagccgaggctactcctggaacatcttgctccaggcttacgctcacaacggccgcttggatcaggcccgggaaacgttccaccggatgccccgggcctggaacgcaatgatcacggcgagttctcgcggcggcagcgtggatgaggcgaagcctctgtttgattcc

SEQ ID NO: 14831 - DNA, 10019 bp, Selaginella moellendorffii
  Intron number 1 from transcript 266598 (locus 266598) deri ved from phytozome v7.0 (chr-ID scaffold_0; pos 6933675 to 6943693 reverse strand)
gtgtggaacttgggcttaaacccaagccgggatgtaaaacaaggacaagtacgcaagcgaaagctagactaaaccttaggttagtcaattatacccaacatacccactatccctactatacatttagaacccctcgtaaccccccttagaggaagactttcaccccaaggttcccttagtaccaagagttaaatttctatgacaagcttgaaacttactaaatatagaatatccttagattgcaaatttggacataaacaaatttagacactttctataaatagcatatgagaccgaaatgaaactaatacaaaatacatgatagtgagggtgtttgacagacatggtaagttatcatctagcaatattgagggaatagtctcaatatacgagggttcttatcactggctaatgcaagacataacgagacaggaactttttactatgctatgtatacttagctaatagcatgtaggaattctatccttatgctcatccagtctaaatacattcgaaatgcctaattaattctactagcacaagagggactgataaagggttactttttcaatatggatatctataatctttacaaataaaatggccttgaaataaatattaatatattccttgttttagcttcttaattgcaattgacaagttataaagaagacaaaggtaaagaaattacttagcatgactaacccttaacaaccaaatgagtgatttgatatcataatagattgcctgtcatgaaagtaacttttgtgcatatttacttgaaggttactcacaaaggttgtttcttagtagaaaatatttcaaatgatattatttacaacatctcaaagtcaaatcttacatatgaggagcaaatgcacactttaaatgacttcaataacaagcttaagaaaaaagaaaaaggtttggacactatggtggagattgtaataaagaggaccatttacattttgcaaactatatatgaagaagagaggttcttaacacctttcatagtatgtgatcttgaatagcttccatttaagaacttcattaccattgagtttacaaaactcaaaatgaatggttgccaaaagaaggccatgagcccaactccattttataaacaactcaaccaacttaacttcatacaacaaatagcttttaggtgatgtacaatttctcaacttcactcaatttgttcatattgcattgtagataaaggcattcttcttgaaacaccaatatgcaattgactcctaaggaattcaatcctcatatgacttgagagttaaattgtaaagttgaaccaaatagaaccaagagaaaaaaaaacattttgtagttgattttatttcactgaaccaaaagcatttcatagtttattatccaacattaataagctaatgtattaatttatcttctatgcaaatacattcattagagttatgcaatagaaaagtttatcaacatttagatttgcgcatatatagtatgtcagcttggacatgtgaatatcttcttgagccactgcaaacaaagtttaaaggacgtgtctgaaaaaggtttcttcattgctcaagagtgttgtgatgttgcctttctccttaaaatctttctcacttgcaaagtttttttcatcaggaaatcaggaaaatattgtgttcaaagataaataaaccatactaaatttcttgcatcttgcagcatattcagagagagagagagagagagagagagagagagagacacacacacacacacacactcagaaacaccttcaattcctctgtgctgatcatgccaaaaccatgccagtagactctaatcgaaaatgatacttgctcttcaagcatgttacagcaactgcagatatacctcaccttttaccccagagaagaaatgaaaacatatggcaaagaagagacgctccatgattgctggctttggttccatcataaattggtagcgtacctaatagggatgtgtccaaagaaccaataattgacgtttgatttaaaaatcttttgcctgccaccttcggcgttcttggtgctggtgatgtgcctggcctccatgcgacgatcttcatgagctgtggcgtccgccatgggagttgtcttgtatcaatcatccaagaaattgcctcgtgatccaagaagcataaggttttaagtaagatccacccaaaagaccgcagaagcagcgctcatacagcatgaccgagctgaccaccaccgtgaattgcgaggacattcgtccgccagcgttttccttccgccatgtgtcaaagaaaatatttttgtgtgtggaggatgctcctagctacacaagcgacctgaatcataaatccacagcgcctatagcaaacccaattgaagcaaatagtgccaaatacacttccatggctgtaaaattccaacagctccttttccttccccaactcctcttgcgatttaaccggtttaggcctattatcagatgacataaggcccataatccacctccatccagtcaggcttcacgcaccaccagccaaaggagctctaattttaaggactgctttcatgaactccaccactgattccaccgtttccatgacctttctccgccctaaaactatcaaatcgataaaaggctttcaaaatctttcgagatgttgatcataattttaatttgcccagccagctaatgctgggcagtcaacaagtgcttaatatgaatttgacattatgattcattcatgagtagttttgcacagagggtagattcattcattcgttagttgtttacggtgtctcgcaagccttcagcacacaagcatgttcccagacatggatgactacttagtatccagggcttttacgactttggctgcaattgtgccccagcctgaggattacaactggcttggaagacaaggctgaacaatgtggagagagtgtgtgttgcgttttgcggcagcaggatttgtgtgtgacgaggctgtgtgagaacaatggccagcactactttacaagcggctgggtgtaacaaacatgaggacagggactgtagtttatgttggaaccaagaagagatcaaggcacaatcaaaggaactaagaactaggacgtgtatatggaaaagcagaatcttttgactcctctgatacaggtgtaaaggaaaagtactgggcacagcagtgtgcagcaatttgcaccacagaagcagtgtgtggatatgaacgtttctcctttaaggcaagaataggctagacagtaagggctcaagttgagatggggaagggaaaggaaaaaaagaagcttcttctttctcatgataatgcatttcgatggttttccatcatggaagccaagttctccaagaagaaggtattcggagtggtcaaaggccgtgaggaagtgctggttcttctccctccagaagaagtttcttgaatgtctatggagcaaagacaagcatatcagcgacggcataaagatttcaaacagaacaatgtcattgtgagagcgatgttgtttgagcaagtatttggaatgccagacttgaagaacacaaattcggacacatgtgaggtatgtcttcaagctaagataaaaaagaaaccacttccaaagaaaacatctacttaaggtaaaaatgttttagacttagttcatgtcgacatttggggagtgtcactggaaaagtcaatagtattcattacttcctgctaattgtggatgatctaagttgttacatagctgtttatttcttaagatagaaatctgaggcaccttgtaagttcatagaatggattcaaaagtcagaaaataaatgtgggatgacaatttgcacattcatagtcaatggagtatggaggacaggaacttctctcatgagaattccagatgatccttgcatcacatggtatcttcctccaaatctctacaccatatgaacatggtcaaaacagggttgtggagtagaagatgttaacaatccttgatgcaaccagattgatactcaaggcgtccaatgttccagtattcttttgggccaaggctgtgaattcatgtgcaaaatattctacctacaaaagcagtattggataaaatgccatatgaaatttggacatgttcaaaaccatctattacatacttacatgtgtttgggtgtgtaggatacttatacatttcatctgaggaaagacaaaataaataagaagatcattcaacgagatgcatgatgtttggctatagtgagaatactaaaggtggctatcaggtttggattttcaatcaaaagaaagtgctggtaaagtatactattttcttttgagaagatgtactagcatcatcagtcagcacaagaagttttttctctagctatggatgataatggctctaaactcttagaatgaggtacttcactttattattctaatgagttaaatatggttcaagcagatctagagaataatggcttatcacaatgagagaatggtgaatctctaaatgctccaaatgctaattcactaccaagatgttctctcagaccttagaaacctacatcccacattttatgttattatgcataaaccacacaagtcattcacgagccaacaaacttagatgaagcactctctggaccataacattttcattagcgagaagcaatgcaagatgaatatcatgctcaattggagaatggttcttagacagtcatttcaccacaagaggttctttgtaaggcttcaatcagatacatacaacaaaccaagtgagattttctcacccatagttaagatggcttttattcattttgttgttacaattgctaatcacttagaccttaggttgagtagatggttgtcaagaatgcatttctcaatggcaagttggtgtatatgcaacaaccactaggttttgcgatccaggggaaggaatgctatatttgtaaactctgacaatccatttatggattaaaatagtcataagaatctattgttttcatgatggcttacttattctcgtgtgtttatgttgacaatctaatcatggccagaaacacaacaaatcttaaatggcttaaagaacaactctccaaacaacttcgaataacaaatcttggtaaaatttccttttatttggactaaaaattgaaaattgtgcatgataggaaaaattaaattctaaaggtctatctcaagtcttggtggtttctttattgcacacccaactgtaactctaatgcttcaattcaacaagctctccaaagcaagtcaaccatgttccaagggggagaagaaggagatggctatggttagagcgttaatgtatttagctctatcaagcaaaccagacatagctacaactgtttccaaagtgtgctagttcatgcaaaatcccaaaaagagacattgatatgcagcagagcagatttttaactatgtacaacaaacttcatcgctttatctcgagtacaaagggatggcaggaagagaaattagatcaggtgcacttataccatatggcatggtagatgctgatcttgccggcaatctagatgataggagatcaacaactgggtatgtgttcaaattctctaatgcagccaaaaacaaaggatggtggcattgtctacttgtgaagctgttaatgaagctttatgaattcaacacatgctccaagatatcaattttgagatgcaagtaccattgaatgtctacaatgacaacacaatccattgtgaatccaatgcatcatgggagaaacaaacactttgagatgtttcattactttatcaaggagcagataaaaaaagaacaagtcaagctgagatacattcccacaacaaagatgactatggcacaaaggctataattgaagtctgactgtttgaatgacttcaaagacaactcgaactggtctcatagggggagtagtgatttaattaatagacatcagattgagggggagtgttgggaaccaaagagagatcaaggtgcaatcacaagaactaggatgtgtatataaatcaaaaagtagtgtatcaatacatgcccaatacttttcctttaggtgatggctttggcatgatgacaagggtggcttggttttgctccttgaagccatatttggctgatggaatcgcttggtgtgatagaggccaatctcgttgtctggagaatgggatttgagcacagggcactggggcagagtggcctatagatgaatattcaaaggcagtggtttatcgcccgtcactcagaccagcataggaaaagttttgtggatcgagttggaaggctggcactggtttcaaatctgacttgtttttgtttccgtaaggctgttgctgtggaaaccgtgatggacttaacatccaacaaggtgtggcttctcctgacgacgctgccaaacgtacggtaggtcgtgttcttgcagaccagtaggcttaacttgcctccaaattctgcgccagtgctttgtcaacaagatatcccatgctccttactcaggcacaccaaaacacctagcactccttgtaatagtacaccaattgccaggcagcggcagcagttgccaaccatatttgtgttctgcacgcagaaggccacgctaaggttggagaagatgcagatggattgctcataaaaagtctcaacacaatacatctctacattctggtgctccttagcatagtgttccacactgatgaagcccgaggatactttccttcgatggctgatgacttaaccatcctcgcagccacttcaggggcaccttgcatgggacgaaagaagcagggtaatcgcctccaactagtgcacaacgctttcactccttctttaacgagatgcgagaagggaaggacagcatgaggtcgaagagaagacgccacgagacgtagcgtttgttcatggagcgcgacaccggattgatcatgtcctcgtggatgtaatgcaccacgagcattcgaatctggtgcacgcgaagcaagtcaccgagaacatcaagatccggggcctgttccaagccattcacccagacgtgcacggtgagcgtctcaaacttgaagtgatctacatcaccctgaaaccactgcaatgagacgaaaggatcagcgcttgagtggtaagaacgagtaaaactttaaatctatgcaccttaagagaaaagccatcgaaatggatgctttccaggctgacaagcgggctcaaaatctcgccaattggaatggcaatcccattggtggtctccgtgttctcaaaggatagctcggtgatcatgggcgtgagattcaagacgtggaagacgctagcatgctcccagttcccagcgatcttcagcctcttgagattgtagaactgcttgctatcgaccacacacgatccatagcacgagagctcgagctcacgcaagctttcggggtgtgagatcccaacagacattccgtccgccaagccgccaactttcaagacaccaagcttcggagcgtcaagaccaatcctatactttctcgttctcgctccaacctcgtcgccctcgaaatcccccgagaactggaaactctcgaggctggcgctcttgagcgtgagatcgttcgaggtgtccacaaagcccgtgacgctgagatactccagcgtcgggcatgccgcgaggagcgcctccaggatctggggagacacacttgcagatctgcaaaactggcagcttcgcaggcttgaaaatggcgactgatcgaagaggcttttagaactgtaaaagtctccagccatccggaagctctcgagcttgcggaagcacgagaacaagctccacacggccggtcccaattcaagacagccccacacctcgaggtctagaaccgtaagagagtcgggccacaagagccagtggcctgtagcttcggatgggttgaggcaggagagcgagaccttgagctccttgaggcagccaggagctatcttcttggtgcgctggagcacgctggtgatggcgtcttctttcttcctcaacgccgtcttgtccctcgcggtgaaatcgaagtggaggcgggtgactgcccaacgcagctctcgccatcgcttgcataccagcgagaactgggcgatctgccgcgcatcgcccaccttggagaagatttccaccagcgagctatcgtccagctccacgctctttctcatggcacaaaaccctaaaatttagagaattataagtgtaaaaggagaattaatctacgacgtactcaaatgatttttcacgttggctccatggattggcagaggccgagaatcagctcgtagaacataagttttgtccccgcctccaatcagctcgctgactctcagtgccgtgtggaggcctgcatacgatcttaggactcagtcaagtttgctgatctcacaaggctgttgcttgcctcatctgtcagctccactctcttctagtgttgcatccctgggtctttgttcttcttgaaggtaggaagccactctttgcagctgtttcgagtgctatttacatgcattattattattattactctatcatacaatcgtgaagcccatattccacatccattaaggaattcccacctcctccatagccttttctccgccctaaaacttggctactaaatagacaaagggcaaagagtttttaagtccaacgttccagcctcttttgctctggaagaatgaatacaagtacctctttttaattatgatagcaccaccttgtatagcttgttcgactcatttgttcctactggaatctgtaacagcatagaaaaaagattcatgacatcgaagagacattgactgagaggagagctttccccagtcagcaaggctgattataatcatgctgctatccttgagagccttcaacaaactcattcacagcctgatgagacaacgttaaatcagcgattgtagttgattagcactgttccatggatcctgtagaaaaagaaaacaatatcacaactccataaacaactaatgcttaaagaatttaccatcttaaaagaacatccggatttgagaattagattgattatcacaatacattgaattattattattattaggttatggcaatcacaaactttgctaagagatctatagatcactcgaaattattgcaaatgatttttagataatcatctttttagatcaatttttgtatacaacattggagaaaatttgatttggccatataattaactttttatttgctgcatgtaacatttgatgatcatcattcatgttacctttaatttttgaaaagatgaattttaaagtgcaatagcatggaaattgcatggtttagctaatcaattttattttataaggaaaacaattaacttaagattccactcctttaacacttacaaaatacctggatattttaggtacaaaccaaaaataaacttagaaataagtaatttataatttacaagtgtaaatgtgagttataaaagccaaactttttgcttgggttaatcttctcgtgctccatctctagtattatataaatgactgtctaatgtgaacacattgtagaacaaaatctcttatacaatagagttctagtaatctatcaaaatcctacattgacatctcacctgcaaaacaatcttgaccaagccctacgtttcttcttctgatgaattctataacaacgtgatagatttggagcagtccaaggcaagatgacaatgtttttgagatcaaggattagtccggtggtttctcgagcttgtgagttcaattcagacaaagattccttccttgcttttgagatcataatagattccaatccaaaaggtacacttgtatggaggaggagctatggagccgaattggcaccgctgctcaagccaccggtagaagtcaagcacacacagctcctcatcgatggaaaactcgtggattcggcctcgggtagcgaaatagttcttcctggatcattctaaattcctgtcttccaggcaaaacattcccaacgattgatccacgctcggag

SEQ ID NO: 14832 - DNA, 8489 bp, Selaginella moellendorffii
  Intron number 4 from transcript 234027 (locus 234027) deri ved from phytozome v7.0 (chr-ID scaffold_54; pos 768474 to 776962 reverse strand)
atacaatcttcctttgtgattaggtgggtatcattgttgtgaataatgcattattgcttacaaaccatgtacctaagattttaaggaagtatttccatagtcagtggtactactttgatctccgtgaactttttgatgaggtgtgttgatctgattacattgcaaaccagccaggaaggttgatttgtccaaatacatgatggaaatataagttttatttgattccataaatatccataatgtttgtctatgcaactatctcaggattgtgaagttcaagacagtgttttattctttctatcttctggcaagcaagagtgacattataaatcaagtcattgaagtcatatgagaatacatgttgcttgtgctttgtatatatcaaacaagagtgacaactccaagtttgaatctgtttttaaattcaggtccttgttcattacctttggttgttgatggaattggcccctgcaagatgatttcttagattgttataaacatcctaacgtttattggcaaggtttgttctttgctgttttgtccttcatgtcaagctcattgaattgtccaggttggaacaaatatccaagagctattgaactagcagatgctagccagaaagcaagactaaagagcaattatggcaaaaaagaaaacgcctatgtcaaggaggtgaagaaagtgtacaataactagggccttgcaatgagtattttgcttaggtacttctctctttagctactggttaatgtaggtagctttcctagagtatgaacaaacaagctatagaagaattttgtgtactattaatcaagaaaagagtactcacttacaaggtgttttggagtttattactttatgaatacagtttgattaccttgcaaagagttctattgttctttctagaaaaacattgcaagtgccaaaagaaggagtgcttctttcgctgctccttgtttctgccaactattatatgagtttgtcattttgtttcatcattagtattgtcatatgtggagcattgacgatgatttagctctaaatattcttcacttttcttgtgctaaatgtgtccccatcaaatccaacaaaagctgcatatatctgctcatttgaggtcttctaaatttttattatgacacttttggccatcacaaggattgggtattttggaatatacatactaacttcttgttccagctatcttgttatcataggtcattgattgagctcttcttgtttcatcatgatgtgagaatttgtgcttgtcagtaaagtgtttcctttactttgaaagtcatcctacagctcaggaaggagcttcacatcctcattcatggctgtccccaagttccaggtgagtgttcagctatggttctttagcttcctctcagcctatgctgtgctttgtcaacccaaacgttaagcaagtccctcaccaaggccttcttccacgtccacaacatcttctccacaaacatcaagcaaggtgtctatggcaagattgcgtatgtgtggaagaattttggcatcgattatgtgtcacaagcttggtggttagggctggacactcccaattgagtatgaattcccagtagcatcaagcttacatgggcttagcagcctggacattggcaacaatccagtatgaagcatcaagctcctattgggtgatctagatcctgattgggggaactcctttcgatccagcatcatcctcccccaatcaggcagttggctcattgttgtaaaatgtgcctgacacaaacaagatcgtccattactacacgagcccaacttagttttaagttattgcattaatttgctatacaacttaaatttttgtcattaagctttccattgatattgtaactacaatttaagacacaaaagttaaaatatgcagttatttgtagtagtcattatttcttactagctttaaagtcagaattaaaaaatttcttaagttgacatttgcagttccaatttatgactaaattttaagtaatttataatggttataaaacaaaaaatatagtcgttatgtttagtagttaattgtgactaaaatttaagtcaattataatagttataaaccaaaaatatgtagtacgactaaattttaagtccaaaaatgaagctataaatatagtggtaatttaagtctatgatcaaatattaaacatcaatttctttagccccagatccatgtcgcccattgaagagtgattccgagaatcaccatcaaagcaaattcaactataaaaaccattgctatgggctgtctctcttttgtgtgtgtcgataaggtcacaatacacgatctttgacgcctaaaacgcaatgaaaagaattttcaaacaacataagcttccagagtggagattttgattaaattcttacgcacggagcattgcatcgtggtgaacgaccattctcatctttgctcttcctcctagaattgagcctgagagtttatcaacgagctccggtttttttgggggaagaaccaaatgagcattatgtgataatgaaagaaagagattccgaacagtgatattgcttccatcatgatcgcaaaaactggacatcataactttaaagcgctgcagataatgcgtccgtacaagaatcatttatatgcactaaaccttcatgacctaaaaaaaaggtttctcggaagcgaatccggtaagcaagaaatatggctagcatcatccgtcggagtgtgccgccgtcgtctccacctcgtcgggcgccgcctccagctgcgcacaggagcgtgcatccgcctcgtccagggcacaggagcgcgacaccgcccaaaacgagagtgccacctccaggtagcatgccgccccccaaaccatcgccaaggagggcgagaggagctccgccacctcacagcagagcccacagtcaggcacctccaccagcaccagcagagcaacaccatggagcagcaaagcagcacagccatggaggagcaccacctgcaaagcaggacagccatggagcaccaccacctccaccaacaagccatggagcagcaaagaagcaccagcacagtccgccaccaacaagccacggagcaacaaagaagcaccagcacagtccgccacctccaccagcaagccacggagcagcacagaagcaccagcacagtccgccacctccaccagcaagccatggagcagcaaagaagcaccagcacaggccgccacctccaccagcaagcgacggagcagcaaagcagcaccagcacagtccgccaccaacaagccatggagcagcaaagcagcaccagcacagtccgccacctccaccagcaagccacggagcagcaaagcagcaccagcacagtccgccaccaacaaaccatggagcaccaaagcagcaccagcacagtccgccaccgccaccagcaagccacggagcagcaaagcagcacagccacggaggaggagcaaagcagcacccacctccaccagcaaagcagcatacagggccgccaccttcttccgggacaaccacttggcgaccaaggaggtttgggccgccgccacctccaccagcaaaggagcatacagggccgccaccttcttctgggacaaccacttggtggccaggcccgctcatgacacgataacatggcaaccagggtcgcctgtctttcacacgttttcatcgccgcctccgcctggccccttgtctattgctccgcctctggggtcgtcatcatcaacagcagcagcagcagcggcagcgtttgcgacaccggggctgcttgtggcaggcatcgtccttttcctgcttgctatggtggccatcatcactggcatctggatactcgtgaagggaagaagaaagaaggcgaacaacatcctggtgcgctacgtcgggagcagccatcttcctggcggtggcagcagcagcagcggcagtcagcgagagtatctcgttcccttgagcaagattgaggacgcagagctccgggacaagctcaattccttcgttcaagagaggagcgagcagcaccttcgaccgtcgcagctaaatcccagcacaaaggtggccagtcctccactcgcgaggcctccaaggcggctgccaccttcggcttttctcaagatgaatccaatctatggtgctgctaccgattcggttgacgaccgcctgacgccgccattgggacgagatccaccagcagcgatccacggagtcgacgagcacaagaaggtgccaagagcttctctcccggaggatccattcttgtcgagtgctgctcgtcggagcggcaatgatcgaagagcccaggaacaggctttggatccagtgtctcatcgtggcactgtgttcgatcctggagatgctttcgttgttcggcttgcgacagcagcggagaagcgagttgagatggagaagcacatgcaaaggatcaccgagtttgggatgaggaggcctggcaacaagcactcccacaggtaagtcttcatgcttgagagatagaaccagtgactaatggagcacttttaggatccgtgaggtggagaatctggagaagccagtggttgaggcaaatcactcggccaattctggaggttcgcatttggctgctcgtgtacacgactcagatgccaaggtaaacagtctccatgcctcgagttaaagtataacttctgcttgaactagccttccacctcggaggttaagcttgagctcgacggagcttagagcgaaaggaggtacgcttttcgctcgttttggactgatgatacgcttgaggttgcaggcacagaatgaagattcatgaaacaaattacttcggttttttaaaaccgcaacaggcaaaggcaggtccgtggtattcaatcgaaattataacagatggagaagtctggaggcatttgaatcaggagattatgatttgcaagtttcaaacaaggcaacaagacaacaacttttcatttcattaagacaacagagagatattgaattgggagattatattgcaagtctcaaacaaacactttggacatttaatttcctgtttttaaaaatataaactttcaatagcatttcttatcgtaagtagtaggttatagtagtcatagaagtcaacgatagtcactaattatttaccagctttataagcacatcaatggattcataagaatgagctcattagaacagtaatgggatagcattgactgatagtagtcagcgttagtccactgtactaacgaaaattcgcagctcaagtcacaccatatggattggaggtcttgaaagcgaggctactctcagccacattctctgtgaaacagagcctcaaacaaggcgggagctgcacgcttagctttccaccccccatcttgagcttgccactgctgctactcttgttcactccttgcgccttggcattgcttgcgggaggctgggctttccatgtttcctggacactagccgtggtagctttcttccacttcttcacatccaccattgccttttctttcttcttcttttcttcctctggttccagagtcattgcaacctcgtcaagctcctcctcctcgtcaagaacagaagcacgtgttcttgatgttgtccttgcccttgatctcgttatcttccaactacttcaagtggagaagcttctggccacccgaccccgtccaaatgcctatgagcagctccagcaaagtccaggaaagtttccagcttcttgaagccataccacacgtgatccagtgtagtgctgctggaagtcccccttgagcctcaccagaggatagtcagatttgcatctcaggatgctctcgagcaggaaatctttgcagttggctctcatcttggctgggaagtcaacagtagtagtctcctctgctgcctccagaggagcctgtgccatctccctcgaggctgtcaaggaggctatctttgtcatggaagtgagtactatatctccttactaaagatgctcaagcttaaccacaacactagttttctttccatacattgtttttttttttgtttttctatcagtttcaggtagctgtcagaaaaatttgctatgcattgcatgtagcaatatttactttgtttaatagtagtattattcttacttattaatccaattgattaaataaaaatttaaaattatagacatatttataaaacacaatattaatcttattgcaggtagaagaaaaaagaatatactaaaaagtgtttaagaaagtttataaattataaacatgtttataaattataagattaatctaaataaataacaactgttagatggtagaatattctaaaatattcaagcatattctatgtttattcactaccatttcagtccccctaccgtttgcttaagcaaaccaaagatggtatggttccaatggtggtatataaaagttaaaaaaaaaatgtaactgagattaaattgattatacagaaagatttgattattttctaattttcacatttattctcagaataatgtttggcaaaatataaaaaatttatttactttttatcacttttttgtaacaatctcccatgcatatggtttttcagccatgtataacattgattctttcaaagcatacttataaaattggaagtgaaatagacttttttagtgctaccatgatatagatataaaattagttttccatgtagtttctaagtcctcacttcatgagttcatagtagaggtagagtagataaatagttcaatttgcaatattttttggtgttgggtttataggcaacatcagaaaagtatagaatataaaatgttataggcactttactttctttcttttctttcatttattattatgtttcctccaccaaaaatatttggttgtttaagctaggtaagaatcatttactcttctccaaggctataaagtttatggagaaaatccaacttatgaccttacatatctaacatattagttgtgtttacaggtgtttttttttttttctgattttagtattttcttgtttaggattctcatatgaaatattattatatattgctaaaatttaccatttcatccactacaatatccacacaattttaacatgttgtaaactaaataactgtataaggatggctataaatgttttctccacaaatgatagtgaccctaataagattgaaagggctatgttgggggattgcacaattacattacaagtgtttgtgtggttagagtgtcattacacttcctcaagaagattgagagtgggacattttagagcttcaaaacaagaatagaggatgcaatccaaacattaaaaaatctcgaagaagcggaaaagccaaaggaggagcaagtatgcggcaaaaagtgggctcataggcaataaaaacactctacaaagacaatagcattagttgctcatagttgtagaatccacttgccaataaagcacactaacttaagtgataaccaagaaatgcaacgcaaactttgaggggcaatactcaaagcattttcaggatttcctaccaactttacctatgcattaggaacaattggaagtcttaccaagctgattaagcaaccctaaattggttctatttatttacaatgtttattctttttaggatggcatttcatgtcctcaacactaaaaagaggtatttaaattttattttatttctcaaaaactagacattttaggagatgtattggcataagtgttgcacaagggctattcaagacaaagatgagctaatgaataacccactccctagtgtaagtgaattaatttttcataatatttttcactcattaactctcaacatcttttgctagatgaagacagaggaaactaatgaaatggtattcttttcatagtatttataaccatttatttgttctttatgtaggtttggagtgaatcacatagcaattcatgtttactatattttcaatatcctttctagaacctaaggagggagaaactaccatactattctaaaaaatgataataattatgaggaaataaaatatgaaatgataaatagtttgatatatataaattaataatgccaatcttattttacaaatagggtgtacaaaaagtagtttttaaagctcttagaagtgtgtttttcttttagaagtggacaaaattatagaaatatttagaaaattaaatcaaggtctcttaatgattgacaatttggtgttactcaagcccaaagatgagctctcccaagatgaaatcaaacaagtgtttgctcttggatggtgtattgaatgggtaaattcttgcatcaattagtaaagaatttctaaatagttttggtttctgccttttgcttttccatgtatagttgcaaacttacttcttaataatggatgatataatggatgattcacacaacaatacgtgaattttattgatgagctatgatacagtcttcctttgtgattaggtgggtatcattgctgtgaata

SEQ ID NO: 14833 - DNA, 17440 bp, Selaginella moellendorffii
  Intron number 1 from transcript 271925 (locus 271925) deri ved from phytozome v7.0 (chr-ID scaffold_82; pos 331820 to 349259 reverse strand)
aagtttcagatattaccaagctctcccttctcttcgtaagtggtttcctgctttacacaatatataagtcatccaaatttgtttcaggatatgttgcttggtgcagtggatacttcagcactctcactggaatgggccatcacagagctccttcgtcacccagccgtcatggaaaaggcccgcaaagatatagattctgtggttggaagcaacagattggtggaagattcagacttggatcagctaccattcatcgctgcaatcgccaaagaaacattgaggctgcaccagctagcaccactggcgcttcccaaggtagtccgaggaggtccttcaaaacttggtggctacaccattcctaacggtacctgcgcctttgtcaacttccattcgctcggcatcgatcctgcacactggaaagatccaatgaagtaccggcccgagcgatttctagaggccgacatcgacgtgttcggacaagattacaacttgctgcctttcggatctggaaggcgaatgtgccctggagctaaacttggatttgacacgctgcagattggcattgctacactggttcagggattcgagtggaagttggcgaagggacaagatccaactgagatcaacatggacgagacttatggcttggtttgtcacaaaacgcagccgctcattgctgttccaaaagcacggcttgaaagaagcgtctatagtagctaagagcaatcgcagagtaccttcacggtaaacctccccctcctgcttaaactcaagatcgccttggaaattggaaggcttgaaaacgttgaaattgctgggagatgttgaaacgattgtttccagtagctatggatgccagtgaacttctcttaagtcgctttgtccctgaagaaaagagatagatttacttctctttggaatattaaaaaatcgatctaaaaacttttaccaagctttcaggcaagccttgaggaaattgtttcacttgtgcttcttgatgtgggaaagctttcaaatcccacacactgctcataacaacgatagaatgtgagctaaacagagaaaagagacacacgctacaaattcatactttaactggtggtcaaccgtggaactttcatcagaagaccattcgatggaagttattgaggcagaatggtaagcagtcctgcgaaatttagatatcgaggaagtatggaatttaagcgcaagagagagtctagatgccatacatggatggcatcgtcaccaccagtggcaagctgccgtttgaaactgggactttggggaacttgacagtgaagtgtttgtttttgagaactgtatacctgttccaagagatcacgttagcatctgtgtcatggactttaaccaccgttttgcaagtaccagtggaaactcccacagactgactattccattggagaagcaagccgcaagctcaaagaaatccaccctcagacaccactgatcatcaagtttatgtaaaagcaacaaagaaagattattcacttgcctggatgaaagaaaagcatggcttagcaaaagaaaaagttcaatcaatcagttcaaagcacgacacgagctatctgtggtgcaccgaactccaatccagagcaaatccttccaccccatgagaaacaacttggaagggtaccttgtttgtaacccgagaaaaagcacggaagttctagcaagaggctaggaagtcccaaacccagtgaaagtatgagagcagtgtaaaccatggcaagaagcttcatatctcgacaacttcagtttctggttcttgttggcacaaatgcgattgatgatccctcatgagctatcatgtggacctggctgaagatcttgcctacaagttgctgacctcaagcttgggagctttgtcgctcatttcttcactgctgctagagttgccattgtcactagcactgccaagttccatgcctcttttctttctgctgatgttggaaagctttgcaatgatgagctgattatctacaagagttgcagcctaggaatcacaggagaaaagagttttaaaagtttagaagaagaagaaaccctttcacttgcgttccagcaaaggtaactcaatcgtcttgcaagatatcaaaggttttttttttctcgaccctcgatcaaaagattgatacgattcgtctttcaaaacaagttaccatgttttgcaacgctgtagtatacacttgcattaaagaaggaagaaccctagaatttaaaaacctcattagtatcaaatgcgaggtggaagaagtggcagccttcgtctagggcgtgcttgatcgtgctgagcttccactgctgcgcctcgccattgcttctcgtggtgagtggatcactgctattgaagtacaagtgctctgactggggagattcttcctcttctttgtctcgctcctggtaaacttaattcaaaattttaatgttattctgttcacatcaacatttagtcaattttgttaaaaaatagttaggtcatgaaattctgttcatataagcatttaaattaacttatttaatcacactttgttcaaatcctcatctatcctcatcttttacctttggtgctcattgaattgtgacaaatccctcacaggtccagtaatattaggagtgcccttacaaccctggcaggcaacaatgtgttccaacgattgagcgcaattaattgattgcaaacaccctaaatccctcatagctcaagtagcagcaacaattgattgattggcaacattctcatagttcaatagctcaacaattgattggcagcactccccagtcatgctgctgcaacaaggataccatgccttaccctagctaatcaccctaacgaatattcttgaatattttagttttaatgctagaaaagtaaggaaaaataaaaagagaatgctaatttaccacgaagctaatttaatgttaatttctggtgtgaacaagttaccattaattcagctattaaattagagtttacaaaatctaatataatagtgtggtggtgtgaacaaattactattaaatttactagtttaatagtgggtgtgaaatctctcttatactttttaaatatttcagcttactattttaaactttttctaactgttttacacttttcattaatacacaaaaagaccatagataaagtgtgaggaggagcttaggataaaaaaagtatagaatctctaaagttggatgaagattcaacctctaaaaacttatgtttcaagaaatgagatagtgaatatttgtccaaagggaattgagcaaaacttgaattttagaaccttgggatggaaagacgtaaccaaactcctaaatatataactaaagaatgaaggaattggagcataacacaactcttaagtgtataaccaagaagtaaaagagtgggagcatggagtgacatttgaataattctagaacatccaatattctaatgccaaaactaatatgcaaaatggagccaaataaaatttagcattattttagcatactggttgaaaatataagtacttcaccaactaacattatatggagctttggcttgaacctaaactagatgtagacccaagttggttataaaagataatatctcaaccactatctctattaaacatttaaagccccaccaccttatatatgaaagcacacttttggtgtcttagaagttaaatctctaggacaatcatgaaaacttactaaatatgagatagagttagattgtgaatctggacttgagaataacactatcatgttcaaaacaatttttgtattccatagatatatctcactcacaaatctagacatttttcataaataaagatcaacatatggggcatgatagcaaagctattatacagagggactaatgctcaacatatgaaggtttttaataagttagtgcaagatagagtgaaaagaaatttaacaaactgagctaaggatgtagacatttaggaattcctttttatgcttatccagccaaatatagatattaaagttaatttagtaacaaaaggactatcaaagggaatcaataatactaatttcctaccatcatggcagtaaaaaaaaaaatccaaaaggactcattaaatcacatttgcaataatatcttcataatgaaaataatattgaagataacaaatcctaatgtgcactaaatcaatctcatgaataataaacctaaaggagatttattgactgtctaccactttagtataagttagatgttatgctagctgaaagagaatgccaagagaaagcacaaactcccaatcactaaagtttatattaatgccactatcatttaaaatgcaaaaaatgaaactaaatttaatgaactaaaagtgagtaatgatgagagatccttgaaaaatataaataaagccaaaatgaggaagaagagatgattcacttagttgagcaccccttaattaaattgaacattttcattttccaaaatgataagtgttgcatccattgtacgagcttgacaagtaattgtcgcaaatgtgacttcaaatatcgaaagatatttgtcggctagtccttataaacactctttctttactgccatgacaatagaaggtcagtactactgattattagcccctcttgtccaagtgttagtaaattaaatttagcatttgtagaatgaattcctaagtgtttatttagccaagcatactttgcttggcttgttagttttcttttgctttgtcttacacttgcttggcaagaacctttgcatattgagtttagtcctttaatgtcattatatgtctactaaacacccttgatatcatattttatgtgttggttccattctgaatctatatgctatttatggtaagtgtctagatccatccacgaggcatatgtacagaatgtagagagtgtcttgaaccctatggtattgttcttgctccttgattcatgatctagcactattccatatttagtaagtttcatgcttgtcccagagactaactcttggtactaagggaggcttggggtgaaagcctaaagcatgtgttcctcaaggggggatatggggggttctaaatgtataatagggatagtggttgaaatgtatgtctgaccatttaagacattagtttaactcctactgggctgtgtcgctccttgttctgcatttggtttaagtttaagcccaagctctatactactctagtcgatggagtaccctcctcttcacattatgccactgatatgccaaaatcatgccagacactgtttgacactgttttgcatgtaggtgttggatacaaggagttggtgctcatgagattgtaccggacccttgtttcatagtgcaacaggtttggagttcaacttcaaattcaagtgtgctacatttggtcaaaacacacatgaccaaatatagtgcacttgagtttggagccaaactccaaatccattgcactatcaaacaagggtccagtacaatctcatgagcaccagctccccatactcaccacttacacataaaatggggtcaaatagtgtccggcacgattttggcataccggtggtttaacgcaaggaggaggatattccatcaactagagcagtgtgaagcttgggcttagacccaaactagatgtagacaaagagcaatatagcctagtaaaagccaaactaatattttaggtggttgaatatgcattccaaccactattcttactatacatttggaaccccccctctcccttcctccccccccccccacccttcttaagaaacacacactttggcctttcacccctagcctcttttagtattaggagttagtttctgggacaagtgttaaacttattaaatagatcacaaattagggagcaagaacaacatcataaggtttaggacactctctacattccatagatatgcttcgtgggtagatctagacacttactataaataacatataaatccagaatggaaccaacacataaagcatgacatcaagggtgtttaatagacatgataagctatcatatagcgatattgaggaactagactcaatacgtgatggttcttgcaagccagtgcaagatagagcaaaagagaactaacaagctaggccaagtatgcttagctaaatagatacttaagaattcctttcttatgctcatctacccaagtatagatgctaaatccagtttactaacacttctttaaaaggagctaataaagggaactagtagtatcgacctcttgccatcatggcagtaaaaaaagagtgtctgtaaagactggctaacaagtatttttagatacccaaaattacatttataatagtagtgtgatgatgaggatattgctcttagaagtggtctatatatattacaagaagtggtttgtgtttacatgatatatatacaagtgtttttcaatttgacatcattattcaacatcaaaaatacattgttgatatactattaaatttgcaccttgctcatatgttatttattccaacattgaggatattaaataaggaataaaggtttaataactacactctaattatcattcctacaattaattatcacaataaataacaagatcaatgatagtcatgaaagatgttaatgtgagacacaaaatccctaggccccaaagtggagccggaaagggtgccacgtggtagtggctgaagcgagagccaaatgagcgtaacacgtttggaccaaaagctccgacttgaaaagtcaagagcgggagtggaactcccaacaaagtgctcgaggaacgagcacgaagcgagcaaaaggcaaggctccaaaaagggacccaaaagggccaacacatgacacgtggagtccgagatggacccgagttggagtccgaagtggagtccgagatggactcgagttggagtccgagatggacccgagttggagtccgaagtggagtccgagatggacccgagttggagtccgaagtggagtccgagatggacccgagttggagtccgaagtggagtccgagatggacccgagatggagtccgagatggagtccgagatggagtccgaggtggacccgagatggacccgaaatggagtccgagatggagtccgagatggacccgagatggagtccgagatggagtccgaagtcgagaccgagaccgagaccgagaccgagactgagaccgagatcgggaccaagaccgagaccgaggccgaggctgagaccgagcccgagcccgagtccgagtccgagttcgagtccgagtccgagtccgagtccgagtccgagtccgagtccggagcctgagagggtgaaagcccaaagcgttcgtctcccagaccctggggggtttggtgagctccaaaagtatagtagggggaggactgcagtggagccagtttggccaggaaaggccagtttggcccaggaaggccggacccagtgttgggtgatgagctgcccactgggaagtccaagactagagtgaacacggaccgacaagcggggtagcttggtgaagtgttcaagagccggctctagttcccccgggagatcgactagccgatgctcccagtccaagtgtgggtggcactacctacttggatacctggtgtggctcaacggaacccgctctaagcccatggctagagcacccaagggcagaaggcgaggagagtacccaggtggctcgcgtaaggccacggtgttccgaaatgttgtcccaaaggcccagactgtggaaaggaagaggagcagtcctctggggtagtgaccaaggacacagttgtgtggtgaggaagtcccagaggaccgtgggacttagtggtcgggtctgtgggtctcgatccagtggcagtgttggcaaacacggccaggggcagaaagggacttagtggggactgacagagggatattggggaaggctattccccttgtcagtgggcatcctaaggatgctaaggagtggatctgagatgaccactcacggatggtttgcctagtcttggagagccaagacggtgatgcaagtggtattggactaccagtgtggcaaaggtgattgggcatggccttagcgtaacgggctgctatgtcggtggtacctttgagtgtcggtcatgggatcggacacgtggagcacttggaccaagtgcaaatgttgagtggcatggatgccattctcggggctagcaagtcccaagtcctggattggacttatggaggttgtgaatgagactcctccaagtggacagaggtgtggttaagtgactaaagtagaatggaaaatttagtcgcttacagttaaatgaaaaaccatgagatctttgatcttgtcattaaagccaaggtaaaaatattctttgagatctatattgtctaatgaaatatcaatagcaatcatttggaactctaatacataaacaaatctagatttggagctttggcaaaaattgttataacttattaatggtggtatactcttgattagtattgttgaacatgctagtgaaacattgaataaagaaattgaaatcttaaagaacaagatcactctttttaaaaagggtggggaatttaaaaaagtctatcatggattcaattgatcctacacaagaagttaaagtggaatattgggtaaactatataataatttaaagtttaacttagtcaaagaagccacaaaacttagaccacatgctttcaaaatttaatggcataccagtctaaaactttaaactagtgagttgctattcatattgaataatttgctgaagaagaggatataaaaaagcctttgataacaaaatattcaatctcttagaagtttattatcaagaagaaggaagacaataaaaattctaataaagtatgaaatagaaaagaaaagataaatttgtattaaacattttgagtacaaagtcgtcaaaaaactttactgttatagggatctaaaaactaatttgatataactgaagctaacttagaaacttaatttagattcccatatacccatctatatgaataatagatattgagttcaaatccggttgaaatttgattcttgtagtggccagtagtggcaaatatacttttttatcaattggtgatactttgtgttcttttagttgtctttagtaagttgttttgcatattgtttgcattctttgatagttaaatttattcagtaaatataaagagatagtaaataaataataaaatctagattattttgagggagacaaagagcactcaatttaacattagactaagaacaagaatcataaaagttagaattgatcaatgtactagaagaaaaaagtgcaatagatgaagaagaaacactagaaatctatagaggcaaagccaaaaacgagaaaaagttgggaaaagataaaaggtaaatagttcctatcaagaattgtgcaccatactaactactatttgaaattgatatggccaaccttcatattacccttcaaaatctttaatttatcttcaaagttattttcaaagtacttgaatttcttatcaacaagaatccatttaagcttatatacattgttttcttgatcttcaaacatcctccaagaactagattgtagtcaatgataaggctgtggacagccttagcacaaactatgaataaatggaacttagtatttaaagtggcatgaaataaaagagaggataatggttcccttaggtaaagaactttttaggatggggacatggagtttgcacaacatgtgcaatataaagtattaaagacacccaaaaaattgactttgagaaatcaaacttaaaatttccaaagtgtgatagttatattgatagaagctaaaaagtagtttaattgagatagaaaaaattgtctttattgggtttagcgagaactaaaccaaataaagggagaactataaaaaatggtctaatgagtctctaagttgggagagactatgctctttacaagatgagcaatgcatggtgaaccttcgatgttgaaccattgaccaatattagtttggtgccaaaaatgaatatggtgatttaggatggggttgttatataaaatggtttatcgttcaatgaggacatcaaactttgtctatggatggtagagttgtgaaacacaaattttagagcctcaaagtggagctgaaaaaatgccatttagtagtggccaaagcaaaagccaaacaaatgtaacatattaaactaaaagctctgacttgaaaagttgaaagtgggagtggaactatcaacgaagtgctcaaggaacaaacacaaagtgagcaataagtgagtatctaaaaaagggatataagaagactaatatatgatatgtggaagtgtcaagatagagtccaagatggacttaagatggagtccaaaatggacctgagatggacttgagatggagtacaagatgaacctaagatagagtttgagatggaactcgagataaacttaagatggaccttagatggagtttgagatggatctgagatggagttcgagatggacccaagatggactcaagatggacctgaaatagacttgagatgcaatctaagatggaccccagatggaattcaaaatgagaccaagaccgagaccgagtctgagtctgccgagtccaagtttgaatattaatacaagctatggggtgaaagccctaagcgatcatcccccaaggggtggctgtagagggttccaaaaatatagtatagagagcatgggggttggactctagtggaaccaatttgactaagaaaggccaatgtgacccagggatgttatgcctgtgtcttgggtgatgatatatccactgagaagtccaagattaaagtgactacggacggacaagtggggtagcttggtgaattgttcaagagctggctttagttcctccaagatattgaaaggtcaatgctctcagtccatgtgtaagtggcactacttacttagatacctggtgtggctcagtggaacctcgctctagccccatggctagagcacccaaaggtgaaaggtggggagaatactcacaaagcttgcgtagggctatagtgttttgaaatgttattctaaaatcttagactatggaaaagaagaggaataatcctttggtgtagtgatcaaggatatagtcacatggtgaggaagtcccaaaggacaatgggacttagtggttgggcctttaggccttgacccagtggcagtgttggtgaacacggctatggatgagagaaggacttagtggggatgcaagaagggatattggggaagggtgtactgggcatcctaaggtgctaaggtgtggtcaagggatgattactcatagatagatggcctagtctttgagagacatgactatgatgcaagtggtcttggattattaatatgacaatggtgaatgggcatggctttagcataataaactgatatgttggtggtacctttgggtgtcggtcatgagattggacacatggagtatttggaccaagtgcaaaggctaaatggcataaatgtcattcataaggttagcatatcccaagctagaaataggacttatggaggttgtgaacaaaactcctctaagtggtcaaaggtgtggttaagtgactaaggtaaaatggaaaatttaatcacttacacataccacatgccacatgtccaaagacagtaaggtggaatctaagtttcagagccttgggccactaaataaaggtatggagctaaactcccaaacttgcaaccaagaagtaaaggaactaaagcatggagtgaatgctaagcttttagcccaaggagcataaaagcatagagtgatgttggaaatagttctagagctgtaagtgactaattttttccattctactttagtcacttaactgcatctttgaccacttgaaggagtctcattcacaacctccataagtccttctcaggacttggggcttgcaagcctcgagaatggcatccatgccactcaacctttacacttggtccaagtgctccacgtgtccggtcccatgaccgacaccccaaagcaccaccaacataccagcccgttacgctaagccatgcccaatcaccttggtcacatcggtggtccaacaccacctgcattgcaatcccgtctctccaagactgggcaatctatccatgagtggtcatcccaaatccactccttagcatccttaggatgcccacagatatagggaataactttccccaatatctcctttctggtccccaccaagtccctctctgtccttggccgtgtttgccaacactgccactgaatcaaggcccataggcctgaccactaagtcccatggtcctctgggacttcttcaccgcacaactgtattcttggtcactacaccaaaggactactcctcttcctttccatagtctgggcctttgggacaacatttcggaacaccatggccttacgcaagcctcgtgggtactctccttgccttctgcctttgggtgctctagccatgggcttagagcgaggtttcgttgagctacaccaagtatccaagtaggtagtgccacccacacttggactaggagcatcggctagtcgatctcccgggggaactagagctggcttttgaacacttcaccaagctaccccacttatcggtttgtgttcactttagtcttggacttcccactgggcagctcatcacccaacactgggtacagccttcctgggccaaactggcctttcctggctaaactggctccactgcagtcctcccccttactatacttttggagctcaccaaaccccctagggtttgggagatgaacgctttgggctttcaccctctcagacttgaactcggactcagactcggactcagacccggactcggactcggactcggactcggactcgggctcgggctcagtctcggccttggcctcggtctcgatctcggtcccgatctcggtctcggtctcggtcttggtctcggtctcagtcctggtctcggtctcgacctcggactccatctcaggtccttctcaaactccatctcggattccatctcgggtccatctcggactccatcttggacttcgtctcggactccatctcggactccatctcgggtccatctcggactccatcttggacttcgtctcagtccatctcggactccatctcggactccatcttagactccgtctcggtccatctcagactccatctcggactccatcttagactccgtctcggtccatctcggactccatctcggactccgtcttgatccatctcggactccatctcggacacttccatgtgttcatgtattggtccttttgggtccccttttagagcctcgtttattgcttgctttgtgctcattccttgaacactttgttgggagttccactcccactctcgacctttcaaggttgagcttttagtccaaacgtgttatgctcgtttggctttcgcttcagccactaccatgtggcacccttccggctccactttggggcctagggattttgtgtttcacaagagcatctaacatcctaatgccaaatctaacacacaaattagagctaaacagagtctagtgctattttaacatattggtgatttaatgcggggatatgagtacttcactagatagcatggtatggaacttgggcttagacccaagccaaatataaaacaaggatacgtacataagcgggagttgaactatgcctcaaattagttaatcatgcccaacttacctattatccttacaatatatttagaaccttttataacccccacttgaggattgcacactttgggctttcacctttagtcacctttagtacaaagagttaatctctaagacaagtgtgaaatttctcattgctatctatggaaagtgtctagatttactaatttagcatttctatgacatataaaggttttctagaatataatgatgttggtcccatgtccaaattcacaatagcgccatttcgtatttagtaaggggcatgatagcgaaggtgtttggcaaatacaataagctattatatagtaaatattgagggattaaactcaatatcatgagagttcctaacattagtaagtgtaatccaacaatatgagtttctcatcaccatgtcaagtatgcttgactaaataacaacttaagatttccttagtgtttttttgttctaagtgcatatataatgattagcttctcaactagcttaagtgaagattgatcaagtgtttagcaatactgacctcctgctgctgttgtggcaacaaaaaagaatatccaaaaagactaggtgacatgtaacttttgatacccatagtcatattcgttctccccctcttagagaagatcaacgtcttcgtcgatgcatactataatctagatcattgccaaggaaacaattctagaaaaaattcatggtgtccacactttgtgagaaatgcaccaatttaaatgagttaaagtaacttctttatttaattgtaaactcctaatacgcttaaccccaaatatcttgagacctttaatctcaagacccttccctttggctgtctacaatccaccacgcttccttgtaaattcacacccttgtgaataatggaagctaagagccacaacactcccgagaaccccactcttttaacatattactttgatacctaatataacctcttgaatttagactttttaataggtcacctaacctagtactatttaaacctaaggacacttaaccccaaatagtcgattgaaaaagggggtgcattcttgttcataggcccttttcatctatatttgaaccctaatagattatctttcaagttggtaaagttagatagactattataaacaaacaatgaaagttgtttacatggtcatgcctttttaatgaaataaaaaatattgaaagagaggttaatgatgtgattagttgatagtagctaccccataactagagatttcaccatgcccatgaagtgctgaagttagtctacttatattggcccaaatagaaagatcaaaaaatggataatatcaaagtcataaacaatgatatcttaaagacataattattagtgaataaatcataaattagaacacaaagatattcaatggtaaattatcatctgataaaccagtattatagtacatgagccaccaagctcattatatttagaaaatataagattcaccatctaacaaaatttaataccaaatataccatcaagaacacccaatgatataactttaaatttacttcacattagcacacttcatattagcaaaagatatcataatatcaaaaatagtaaaagttgtgtaactatgtcccactaaagcacattgaggattgaagtagcagtaacaaaatcacacctcataacaccaaaaccttgatcaatgtgtgatacaataatagaaacaatgttgccagattgagataatgaataaagccttaaacatcacactctgagaacaatgtggcatgataaaaaaaaagaaggaatgtaatgaagattaaaaaaagagcaaaattgatagctacaatccttgatcttagcaaaaattacaacaatctaaatttaaagaacaagggaattataaaaacaaaaacacaatcttgaatactagatcaaaccactgccaaaaaaccttactctctaaagaatttttagaaactatgagtgtttaggatataagaatagttatattcattggggtaaaaatctttgtttatatacaaaaatggatggattatattaatttcaattagaagatctatatacaagaaaagctatacaataaataagctaaattaagctaagagaaattaatagaactttttttacagtttttaatattgtcaacttgataaaaaaagagtgaaacttaatcactatgttatttatataaggtatataaaaagtatacaaggaatattttatgatacctttaaaagggatagaataatggggattagatgttttgccaaataaagtagaacgtgatcttcttgctcctttcacaatccaacggattagtcaaggatccagtttgtcaataattatttcaagcgatactatcactattaaaacccacagtataagtcacacaatctcgttttctcgattctttgtctcggtccagcttgcttcgactttgagccaggtaagtagaacgtctatttcacacaatacaagaacattgtccagcgcgtgtcacacaaggccggctatttctcctcactggagccaggtaagtagaacgtctatttcacacaatacacaagaacacatgtcacacaaggacggctatttcttttgctaaggtaggagaatttcttccttcttaagctcagcacctctctctgctctgtttggtgctccttccagcaaagaatagaaagaatggagcttctgtccagcattccagctttcctacaagaaaactgctactcgttgttgcttgtattgctgcttgtgattgtcacttcaagatggttcttcagaaagcccagcgatctcccccctggaccatttagcctgcctgtgattggttgtcttcacttgattggccctcttcctcatgtgtctcttcacgagctgtctagaaagtacggtggcattatgcatctcaaatttggtacagtaccgttcgtagttgtgagctctgaagaagcagcaaaggagctgtacaagtatcgtggccttgagtttgcttctaaagttcctactatagctggcaggcattttggcaatgatttcaatgggattgtttatgcggagtacactccacagctgaaactgtacaggaagatcgtcaacactcatctgctctcggcaaccaggctcaaagtctacgacaagatccgcagggaagaacaatgcagtctagcgcgttcgattgtgtctgcagaaggcacaccgatcaagctcagagacaagttccacaacctgaacgtgaacatcatcacttacatgctcttcggagagcgtttctacggggcgcatgccaggaacacagcagcacttgacgcttttgcggatgcagttatagaaagcttaagattgtcaggggtattcaacatcagtgatttcatcccagcaatcaaatggctggacgttcaacgcttggagaaacggtacaagcagctgatagctaaggtgaacgactacttgctttctgtcctgcaagatcatagaaggaaccctcgaaagtataggagagatgagcctgttccgttcattgacgtcctcctttctctggattcaactgaagaagaagtttcagatattaccaagctctcccttctcttcgtaagtggtttcctgctttacacaatatataagtcatccaaatttgtttcaggat

SEQ ID NO: 14834 - DNA, 6261 bp, Selaginella moellendorffii
  Intron number 5 from transcript 128654 (locus 128654) deri ved from phytozome v7.0 (chr-ID scaffold_91; pos 547955 to 554215)
ctcttgggaagtccaaactcaggagcttacatttggtatcagagcagatctcaagtttgactctgttggttggctaggggaatcgcaccacatgttgattgacatttggtaggtccagtttgctcccgctaggctcgacccgaggggtaaggtgtcaagagagcagggctctcgggagagccgcggctcttagctcttagcttccgttcacgaaggcgtgaacttgcagggaagtgtggtggattgtaaacaaccaaaaagaacgacttaagagacgatccatggggttcaaatatagaggaaaagggcccatgaataaaagtgcacccccttttccaattggttaagggttttgggatatttgggttaagtgtccttgagtttgaatagtactgggctaggtgacctcccgggaagtccaaactcaagagcttacaatgagcaaatttggacactttccataaatatcatttgggactgaaatgcaactaatacaaagggcatgatagcgagggtgtttggcagacacggtaagctagtaagctatcatgtagcgaatattgagggaccaatctcaatatcgcaggggttcttgatattagcaagtgcaagccaaagacaaaagtttctcaaaccaggccgaatatgctcaacaagaaacacatagggttcttactttatgttcattcgatttaagtgcatggtcattgactagtttttcaattagcctaagtgggaactgataacaggtcaaacaataccgaccttttgccattgtggcaatatccgaaaggactagccgacaagtaacttttgatacccgaagtcacattcgcgatatatgggcaaagatgttcaatgcttagatatactgttggttatgagaatttatgttgaggtgaacttatgtgaagttgttagtagaaggaagttagttaagtcttgaaagtttgtattcttggattgagagtcattctttctctaggatagaaaaaaaaaattccacaaattttcttagacttatttaatggctaatttgttgatgattttgttcaaaaaccattccatctttgtacgccagtacaaactaatgaaggggttagagttgactttgttagtttagaccttagtaagtagtttgtatgatgtgacccgaaagggatggtaaattttggagctaaggcaattgagttgaatagagtctggagttgttgtaaaaaagtggctattacgcttttctagaaaggtgacccttatgcctttcttttgtagcattatgcttggtggcaggttacaccttgcatttcgttagactctatgagaataatgatctctcaatgatcttgacttggtctttgtggtcttatgccttggctgaggatggtgatgtccaacttaattgtttaaggttgaggtattggtacccatactatagctttgtctataaggaggttgtgtaccaatatgagtccatcttatggttttcactttagtttcaattgagtgttaatcgtgcataattagcctcttcaaggcatgctcagagctaatggttaaatgcattggtgagcttattgcggataagttagatttgagtggtcatttagtttgtgcttgtccatgaacctttattttgtacttgaggtattacattcttgttggatgagtatatgccttgatagcatgagtttagtgtttgggtcttatgaatgcaagttgaaaagtgattattggttgctctgcgactagtgattatttgtaaactttgttaaggattgttaacacttgcttccctcgataaagatttatcaccgatggacttcctttatcagatggtgttgcgaaggattgtatcgttaatcttacatgggttgtccatgttggcatattaactctacctttgtcaaggattgttaacacttgctttgttcgataaagatttattagcaatgggcttcctttaccggatggtgttgcggagcatcgtgtcgttagtcttacatgggttgtctatgttggcatgtcgactctacctttgccgatatcatttggttgcgtttagttcgtaatgttggattacattgagtcttggatgtggtgaatcactccttgataacatgttatctgtagttgagtgttgttgaaggtttagtctcggatactgagtaaagtatctttgactttggttagtttagttgctagagagttttgaatggtgattcactcttgatttcttctagctttatagagtgatattgagtttcatttgtctcgatgtaaatagtgttaatgcttgggctatagctttatgttattggcattcgtgcctttgttagttagcaactgtattgacattcaaacaagttgagtggcaagttgagttagttgtgttccaaacgaaattgcttaattgaggttgagttttgagtttttccttgaaaaatgatttagtcgtgcattatgctagccttacgagtgaaagagttagtgattgatattgaagtgattgaatatttattggatttgagttgggatatatcgatcattgatgattttttttgtgcttgttataaagtgagttacgttttactatagatgaattcatggaggattgtttagtgatcacttgttgagcataactttgttatgctccacttttggattgatgcaaatatgctcttcattatatttggcattatgaagtttggctatagatatgttgagggggatattgtgggttgcaccatgattttttctttagcattgaagttgattcatgtgcaacttgtgatcattgctaggcaaaacttagctatagacttttttgagtttttggttccttgagttttcatgcttgtggtccatttgtttgaagtggctggggaaggcattttggctcatagcttcgatgttgtagttagtatttgcatttagcaattgttgatgatgattaactatcatctaggatagttgattatccttgtcaaaaggttttgcttgattgttgttgatatagaatagttcgctattcttcgagatggtagattctttctttgacaatcattatgtatctctttattgatgggatgattaatagtcttatatgatagttagtggttctccttggtagcttttggcttttcacattatcacatgttctttgtggtttgctctaaattggtctcttaggttcaagacattagtaggatgttgttgacacttacttgagcaactctgtttccttggtattgttaactgggatctattcaaattggctaatgcgatagttggcataaatgagtgtttgttgatcttactacattcattttgttttgttgattattacttaagttaattctgatagattgggatgttatttcctttgggtgatacattcgcgaccattttgcttgtcattcaatgatactttgtgtttatttggttctttttggtaagttgtttagcatactattgacaatctttggtagttaagttttattattgagtttccttgataatacattggctattgaattttgttggatggtgaattttatatttccaaaaacatgatgatcttggtggttcatatactgtaatactagtttatcagatgataacttacttggaatacttttgtgttctaatttaagatttaatcactaataattaagtctctaaaatatcattgtctatgattttgatattgtccatctattgatctttgagtttgggccagtataggcaaactagcttcaacacttcatgtgcatggtgaaatctttagtcatggggtagctactatcgactggtcacatcacctgcctctctgttgatgttccttattctgttaaaagagcatgaccgtgtaaacaacattaactgcctatttataatagtctatttaaactttaccgataggtttggtttctttgctcaagagggttggggcctctgatttctctatctatatccctgtgtgtagaggtgtatcacacttttgtaagctgggtgacacctagagtagcaagggtggctaacaccgttagtcatttttttgttggtgatggccagaaggtgtctaagctggtagtgcatccgcgtttaacaaagaggttgccttctaactcatttaagttggtgcatttctcttatagtatgaataccgtgaactttttctggagtttcttccttagcggtattctagactggagtatgcatcgacgaagacgttaattttccctaaagaggggaaagtgtcacgaatgtgacttcgggtatcgaaagttatctgtcggctagtctttttggatatttttttcttattgccacaacagcagaaggttagtattgctagacccgttattagttcctacatgggctaattgagaaattggtcaatgaccgtgcatttaaatcggatgaacataaggtaggaaccctatgtgtttcttgttgagcatacttggcctggtttgagaaactcctgtcattggcttgcacttgctagtatcaagaacccctgagatattaaaattaatccctcaatattcactacatgatagcttaccgtgtgtgccaaacaacctcgttatcatgccctttgtattagttgcatttcagtcccaaatcctatttatggaaagtgtctagatttgctcatttgtcatatctacagtataaagattgacttgcacagtggagtacaaaatggatgacttggtgttggtccattttccccatcttacggtacgtggtttatctaaaggactctttgcttagtggaaaggaccgtatcaagtgttgcggcaaatgggaccacaagtttatgaggttcagcatgatgtccagcagatcaatcctctagagattgtgcatatgcaatggttgaaatgcttcatacaaagggatcaggagcaattaataccacctacagatccaccaatgcctcctcctgatgttcctccagatcctagcccatctataagagaactctgatggtcttccattattccgagaggaggggatgatgtgagggccaagtgtacggctacgatgccgtatactaatattagtgtagtgggattttagtaactgttagattagtttcaatctggacctatataagctagggtttttgggctaattgatatgcacattttctgtatttcctttccatattccaagcactcaaaagccttaatttttgaaactttataatatttatattaagcttgtaaactcaaaaatggtctacactcatcacagacatttaatgtatgcatttaatcttccagaggttatatggaaaatttgttcaaagttggaactttagttgaatccaaagccttggttcatgcagcctgatttcctagattgcttgtccagcttgcaacgagggtttcttttataggatgaatcatacagatgtagttgaactggacataagtttttcctgcatctaagtagaacctgcatccggctgcaaccaatgctgtgagcaattttcctatcccatgattcccatctctaaaatcagaatcattgttcaacatggaagagaagcacaaagtttgactggatgactttgatcctttgtttgagtcgaaactgacgcgtatcctggatgtttccatagcttaacaatgttggtctcactctcagtttcatgatcgagagagtttagcacataaatacaagagcatcattccatctgagccagcatgccgtcagactagtcgttgttgaacatttgttatatagaagtccagatcatgggtcacaaagtcgtgatggaagtctaataagcacaaaatttcaggcctacatatccatatgagaaagaacaaaccttgcatcgtctggagaagagccatgttgtggctcgcgatattgctcacatttgcgaccgttggtggtgggaatgactccacgatcctcctccgcttgagagaacatatggcaggtaatgcttgggattcaagcacaagcagcatctgtgaatgggaaggcattgcttgttctaaccaggggcgggtagttggacttcatttacggaatctggcatcgttcccgagctctcttctggcatctgctatccaaggactgctggagttgaaaaagttgatcatttccaacaccaacttcacgggttctgttgaggatctgtcgctccaaacatgcgctttgaacatgctcgacttgtccggtaacagattggaaggaggcgtcctgttgcagcttcttgctgactgctgaggc

SEQ ID NO: 14835 - DNA, 48899 bp, Selaginella moellendorffii
  Intron number 1 from transcript 125663 (locus 125663) deri ved from phytozome v7.0 (chr-ID scaffold_79; pos 249085 to 297983)
ccagtttggctactgcggatcgacatctgagtactgtggcgcgggctgccagcgcggctatgggagatgcaactaaatattccatctaatgtgctagacacctgcaacatgaaagttgcgagtaatatctaattaagcactggtgtcctctattctctttttatatatatggtgtgatgtttgctatgttaccaagctgaacgcattaaaaatctcatccaatgcaatctccttcatcaatgacgcccaatgcactgcaggttagtatggtggattccttctactgcatggaaagcttttttagatgccacacttgatcgttcttttacagctttcatctgaattggacctgctagttctcccttggcttggcattcaaatgaagcaatgaagagaaaggatacaggagcggccttccttacaatatgttgatcttagattgactttttattcagggcttcaatgtagaaattgcagtgatctgttgagtgctagagcagtagcacacatgtagacggacatcctctctttttgcatcagctgttttttaaggcagactgtaagaagttatactgttctgttacgtggcactttgcaggaacgtcagcattttttagcacatatgagcattactatcacactaactcatcttctagctgcgcagctaagagatgagctagtgcaatagcaataacaagttgagtccaacctgaaggactgggctgtgattcccataaaaaacattttggttttaccaagcaaggttggctctatggtaggataatagttgcaatggcttcaatgtcaatatctttttttgatgatattcctacaagagattggggattttttgcagggctgattcaaattgccagacatagagctggcaggagtggatttactggaaagaaagctttttataaaagtcttacaccggcaaaaacgtgcaatagaaaggtgaatcaagactcaagaatctagacaatcttaacacaaattctaggttacaaatagcagtttctagcattgaagccagattttacaactcgcttttgagaatggaagggagagcactaaaaactaacttctccaaggggagcatgatcctgagccaccatagcttgctccaccattgtaagcatgcaagaaggcagaagaagatagggaaaagcattatgaacctgaagagtgcgagagaaataaaagctacaatggatagccattaaaaaactacacttcttgaaccttgaccacagttttgtctctctactgtcacaattacatatctatgattcaggaaggacattactttatgaccaaactggaatcagtttcttgaacattgttttgaagtgcacttcatatatacttaaaagtgatttggctgtccacgtggatgggctgagcaagctaaaagtgaggtttgatttcttttagcaatggcgctgctgttacttttgagctatggcacatgcaactttggagatgcaaggacaagcagcagtgtcaatgaaggtccatcatgggagtgttacagaagtagaaggttgctgtgatcatgccactggatggacagcagcatctataaaaagaatcagataatagggctaaaaactaaaaaacacccaaacttttattacttattttgacaatgcttgttatgtgaagtgtgaaagtttaactacccaaatactctccctgtctctctctcacacattccaattttggtatttgatgtgggaatagtgattgccagcattttttaaggaccaagtggtgagtgatcacatgattagtcgaacctctttatttgaaaactagattgctcctgctttcataacatcacttgcactatttttgctccatgttgaaaatttccaactttttgatgcaaacaagcttcactgacttagagatccttgcccttgatgagcagcacaaggccttaggcaggtagtttcttgttgcaaagaacaagcttaaggtggtcattgactccttaactagttttgaatctattaccgtcatttcatcccaccatttattacattcatcaccacaaagtcacaactaaatcacacaccattctctctacacaccattgcccattcttcatgacagttacctacattaggatcatagcaatttcatctactttctatctatagtctttggtattcatatcactccactatagccacaaataccttttgatagcagtaaaaattatccaaatccatcatactatttacaataaagattttacaacattgtaacatattagcacttttggagtgatgtttcttgagctagcatcatccagcatataaagaatgcccaagccatttttttgagcaaactgacaattgacaacacttttctttggccctaagcatttatggataaatgcaccactgaataagcaatgttccaacactttaaattgtccatagtagttgtgacttgtaatttcaagcctcttcactatcataaccattcatttccacatttttggccttattcattccttcacactttcactcactttagcatttaccactattgggatccatcaccatattactaaaacttttgagggtgacattctataagtttgtaaaccttgcatttataatcaaaatttagtttttgctatcatttagtctctttacctctttctttttctctttttgtttcatttctattttttctctttttttcctcattttttcttctttatttttccaagtgtctagtttgcatttaacatttatcttattgggtttttccctctagtattaaattttacactacatttctctttatttctttgtttctatttctcttcttttcttttggttttttattttatttttctttctttgtttgcatttttctcttttgggcatttgaacaacatgatttttacaactaggctgtgggttctcttttccctagagcttactcactcaattgttgttggtcacttgttgggatgcaaaatatagcttaaagcacttaaaataattttaattcctaaaatatccttatctctttgtataaaagcctaatgagtgaataacatttatgatatttagggcatttggttgtgcaatgaaggtgatgaaagtttgagttagaaaggttaggaaatagcatttatctcctaatagtcaaagtgcttgaagagtggcagcataacatttcaaggtatacatagataatgtgggactgaaacacttattgtcacaacctaacatttggggaaaataaggttggtggggtaatgctttaattaagtttgattgcataagttagagaagatcaatattgtggcaaatactataatttggaaagcaagtctggagttgatggtatctaacacaataacaaccttctaaaataatatgtggatagtgtataaggacaatgaatcaacatagaaggtgttgctaaggaaaaatgcgacatgaaacattctttattaagacaatttgcctaataaagagaaagtaggttatataaaatgtaatggattcatttattataaaaaaatgagggtgcatattccaaaagaggaaataaggaaattaacattaaaaaaatgtcataacaggcttcttaagggatataataaagtacccaagactataggtttgctcaagagaagtatcattgattgaatataaataaaaatatacaaaactatgtaaatacatgccaaatatattagtagtgaaagttatgactaaaactagtggggtttataacaaaacctcccaatccttgatcattcgtagaaactttttataatgaactttatcacaagattccccccaagcaagggttgtgaaatggtttttgaaaatgacataatttatacccacaaaaaaagtgaatgcaaaaggtatggttgtgagtgtttggaatgtgaatgtgagtgattggaatatggaaaagaaatacagaaaatgtgcatatcaattagcccaaaaaccctagcttatatacatgagcgagtggtccgaattgaaaccaatttgacggctaccaaaaccccactacattaatattagtatacggcatcataactgtacacttggccctcacatcatccccttttctcagaataatggaagaccatcagagttctcttatagacaggccgagatctaaaggaacgttaggaggaggtattggtggatctataggtggtattaactacttatgatccctttgtatgaagcgtttcaaccactacacatgcacaatctccaaaggatcggcctgctggatgttatgccgaacctcataaatttgtggtccaacttaccgcaacacccgatatggtcctttccactgtgcaaggagccccttagataaaccatgtttcgtaagatggggaaaatagactaacaccaaatcatccactttgtactctgcaagtggacgatgatgggagttataacgctgttgttgtcccacttgtatgcggcctaagtgttttgtagactcagcttgaacaagtagaagaatgctcgtcaaatattgatcccatgatctagcatcggcagctcgtagcaatcgtgaaggtaaacccagctccattaataatattggatcatgatcatatagaagttatatggtgaagcaccaataaaactctacacccctgtgatatatgcataccaaagagacggcaaataaccatcccaatccaaatgttgaaagttcatatatttcacaatcatccttttgaatgtccaaacgagccgctctaccagatcatttgattgtgaatgataagcactcgtgaaagtgtggcgtatccccaaccgagacatcaaaacatgaaatgcctcagccataaatgtgggaccattatccgaaagaatctgctctggacaagaatgcagaaacaccactcgattgaggaggaagtacccaacaatagttgcagagtcgctaataagagcagcaacttccacccaacgagttaagtagtcaaaagcaataataacatactcattgctagtagttaaccatggaaaaggtcccataagatcaaacgccaccaactcaaatggaagggaaatggcaattgactccaaccatccttttgcaacacgagggggaatattacaagcttggcaccaaatgtaactacgcaaataccggataatatcacgtcgcatctctggccaatataaagatctgtgcagcttctcggttacacgacaatgtcccatatgcccaccgagaacaggaaaatcatggtaggcatggagaagccgcggaataaagacagaaggcaccaccaaccataaatgatcatcaggatctatcccaaaaaaataaaaaaggctgttttcaaggtgatattgagaatgtaaatgccaaaatggcaagtcatcagcaagtcatcagcaagtgatgcaggattctcaaatccatctcgaagccttcgaatccatggctcaatcttttgagccttgcgaacctcatcaagagaaggtagatctttctttgcaccttgtggacactaaatatcaagtacagcaactaccgatggcatagaatccttgtctagaaaatccacagatgctagaccaatagacttgtcagaaatacgataagagagtggagaaggaagaggagctcgagaaagggcattagcatgtaagcgactaaattttccattctactttagtcacttaaccacacctctgaccacttggaggagtctcactcacaacctctataagtcctatttcggacttgggcttgctagccccgagaatggcatccctgccactcaacctttgcacttggtccaagtgctccacgtgtccgatcccatgaccaacaccccaaagtactattgacatatcagcctgttatgctaaggccatgccccttcatcttggtcacactggtggtctaacaccacctgcatcacaatcccgtctctcaaggactgggccatccatccatgagtgatcatcccagattgtcacgaatgtgactttgggtatcgaaagatacttgtcggccagtccttacgggcactctttccttactaccacgacggcaggaggtcggtactgttggtcccttttatagtctccactcaagctagttgagaaactggtcatcgcatgtgcacttgaccagatgagcataaggacggaattcctacatgctatttgtcaagcatacttgacttggttagagaaactcattcgctgacttgcacttgctagtgttgggaacccccgtgatattgagactagtccctcaatattcgattgatgatagcttaccgtgtctgccaaacaccctcgctatcatgcccttagtgttggtctcatttcggtcccatatactatttatggaaagtgtctagattcgctcatttggcatatctacagaatgtagagatcagcctgaacacaatggtgttcgtcccgtgtccaaattcgcaatctaaggccattccatatttagtaagtttcggacttgtcccagagactaactcctggtactaagggaggcttggggtgaaatcccaaagcgtgtgtccctcaaggggggggggggggggttctaaatgtatagtagggatagtggttggaatgcatgtccgaccacctgagacattagtttggctcccgttgggctgtgtcgctctttgttctgcgtccggcttgggtctaagcccaagctccacgctgctctagtcggtggagtaccctcctcctcacgttgggccatcggtatgccaaaattgtgccagacttcgtctgacaccattttgtgtgcaggtgctggatacggggagctggtgctcgtgggattgtaccggaccctcgtttcgtagtgcaacgggcttggagttcggctccaaattcaggtgtgctacatttggtatcagaggaattgtcttagcgatttctatccaacttttgtcagattttctgactcaagttgcatacacagagacttttctagtagatccgaagcgacctgtgtaggattagttggatagcaccattcggtaagaacgttgtatgcatgttcagttactgatagaggcatgcatgcagctagcaggatggtgaagaggaaccgtgctgatgacgctgaaacctctagacgggcgaatcgagaggacgaaactcctgctagagatgctgtggaaggggctgaggccgagtcggaagaggatgagccaaatgctgcagcactgcagcgcacggctcatgaagtcaagatcgagaatttgcgaaaggagattcgcaaattgaagaaggagaacaagaagaggaagaaagaagctgaggcagctaaaccagccaagcctaagcaaccggactcctcctctagttctgaggacgatgaagttctgtagccacccccggttgcacgagtttcaaagttcaagcctccaaaaccatccaacttcagaggcatgtgggactatcaagttttggaagactgggtctacgatatggaaaactatttcatagcagcagacgtagatgatcgtacgaaagttgcgtgcgcgcaatcctttctcaccgatcatgccaaaacttggtggtgccaggtgtgtgctgaaaaagggcagactagaagttggaccaagatgcggtctcgtatccgtaaggaatacttgccggataatcttggtctgagactttgcgcaaagctgcggcggttaaggaccttatgcattacgttaatgcgtttgctcagaagcgcattatgattgcaaatatgagtgacgaagatgctcgaagctctatttcgttaaagtgggaattgtcattatcccacttgtaaaataaggtttccaaacctttatatagtatataaatataacaaaattcaattgcattgaggcacatgccattttattttaaacaaggaaatgtctactcaatcacttctcctccccttgccactgcttcacctctctcttctccttgtcatcgtcgtccaatttctttccatccttttaatattaagctctatttcgttaaagtgggatttattcagtaaaatgggactaggtacaaattttcaagtatttgaaaatgacgtgaaattatatgttttttgtctaggggctagacatatctggggcatggtgactagcgcggtgactttgtgtccagactgagtccatctggttgtataataaatctcattgtcaaggtgaacaagccgaatctgaagctaaagaagagcgatggcatgcgcgcacacactatttgtttgttcattgagcgtgtggtgagctttccaagatgaacgtcattcctattagccagacatataacttaatggtgagaacatttagatattattcaatgttatctttttctaacgaatctaattgtgaaggtgtagcaagaggcattgctagtctggagaagtcatttaactcatttgacccttagtgtattttcatgaaactaaataacattcatattattaaggaatttctctagtaccttttttttacgacatagaggcttgcatttctttcaaaggtgatttagtaaaaggcctgagggcacatgccattctatttctcagaccggtattaagatatactagtgcaaagggccacatgccatcacgcctcctctgattcagattcggattgttcaccttgaaataaaatacattagaaacttagtaaaggaatattaatgaatctcaccttgaacccgggttatgaatgctcttgctgcatctcttgcatggtctggcaaggtgatggtggcactctgcttccgcatccaaccatgcacaacattatccaccgatatgctcatgctgggatcccttggattcagcacccatcttttttctaggcaatccttcgtatatccggaacttggcttgaaccactccacagttacattgaaggagttagtttccgcgtcctcctctgcatcagtgatgcagcgccccacccatatcatttgttttttattactgggtctgacaagcacgaccattcctttgcagacctgtactggattgaatgctgaatctggcttcttgttcctcggcccacaatagtgatcctcaacatcgttatctgtcactgcatttccagaggacattgttccggtactatctggtgctctgggttctggccaaaaggactcttccaattcttcatatacaaccggcccattttggatagcagatataatcttctcccagtattcgagcaaaggcttgcacctcttaaaataggattctccaccaaacaccaaccccctcttccagaaggcaatatgctgtctaatcccggccactatactttcctggtctttgagtccatccgggtgcatcggccgtggggaaccttgaggaatcataggttccccagttatgggatctctcttgaagagttcaatgccttccactggcagccacactgtgtcccattctctcatcttgtacctcatcactggagcaccgtcacgcatgctgaaatgaaactgaagaggcttggagtggccaatcagcgtttcggatccgtccctgatgtagcctcttacaaaccccttaaagtctggaacctctgtcacaagtgcagcttcaacagtgcctttgatgcaattttggaattcatcgtagagttgtgggagggtgaggacattggatcgccggagggactctgccaggtgactgaacatggcatcgacgtcttcatgagtgtgcccaaccatgagaaagccaagtgtaaccgtttcaaatatgcctttggcaacaagcatcaccaagtacgcgaagacgtacatgtttttgttctcactgccagcattgtctgtttggagcagaagatggggtggaaggccacatcggccgcaagaacttccttgagattctgcttcgtttggatgaggctgtgcattcactgggcgaccagcctcgtcggaatggcatgaggcctcacgtgataaccctacaatctgacggccaacatattcactgggatggcatggggccccacgcgatactgcaagcctttgctcctcctccagctgaaccctgtatggggttcgatcgacaagggccttatgcaagggttggccgttcagctcagtctgcgcactttgcagagaccttaagtgttttgctagggacgcaatcatcatgtttgcacccccgccaccccatagaggtacaaagaagttcccatagttctgggcaccatgcccatgagcgattatgccaaacagagacacaggcagctgcatggatgaagagattgccttgggggcaggattgagtcgaggtaagcacgtctttttctggtccattttgtcgtggatgatgcagaggtaagagtcaggtctctccatggagagaatcctgttatgataatatgcagtcctgcagcttctctgctcgatgttgtggtcgagccgccttctaaccaacgtctctcgctcttgagcgctgcaagaattcttcgacaaagccattttgatagcagtgcactcgtcacactttgaaaagctggagtactttcttatactcacatccctgaacctgttgctccacaatctactaaatctagattggctcagcttcctgtagccattactctggagttcccgattcacatcttccaatatggcccccttagtatacatggaagggagaactcgttgggtgtctcgtgttccatcttccaagaggcgggttttatgtggttgctgctcgctacatgtctcgacaaacctcttgaagattgcctctccatatacaacatgacccctagttttgtgcgtaccgtcgttcccatggactgcctgttgaaccctttgttcctcgaactcagttttgattctgtagaatgtggttcgagggactccataaatgattctccatgccttcatgcagaccaaacccctctggaagaccatgccccccacctgatgttctgaagcatcaacagatgaccgtaatgcctcatacacaaaattgcgagctgccttccaggacaatgtcttgtatcttgctctctcctcttcaatagcatcccaatcagcatgttgacagcacctcctcttgcaacaagcaactgtcgagaccattcgaacctccatcgccattttctgccttttcggttcgttgctcagatccctttggctgcgctgtaggaaggtgtactttcttttcctataaagagatgttctgtcatcagttgtagtggtgtttgattgtgaatccttcacattctcaaacactaaatgcctcaatttccaccgcacaatgcttccaatagtcagactgttttcttctgtgtcaacaacctctaaaattgcaactccaatatcatcccagcccaattcttgattagtaaccgcatctcttggatcgacaactgtggctaagccctcagctaccacctccctctcggggttgtttagaaacacctttgcctgaatccatgtagcacggttcttaagatccacggagggaacatgcgtcgcacttgcgctgtccctaacatttgctttcttctgcagatttttcaaggcaacaacaacatttaccccgacgaccatctctcctcgttcaatagcgaccacattcccatcgaagacagtctctactgatacagtagcattgccttccccaagcctttgacagtgtataacaaagttccgatccatagacacaagggtcccttttgcaactctcttcccaccattcaaaatgtaaaccttttccccaaccttgaaggccattctgaaagtgcagaaaagaagttaagaccatacaaaaaatgattggagaatggcctaaatcataacataccaaatagcatgaggccacatgccattattcaaacatgctattgacacccacgtgaaatttcacattcacaaaattggcatgaggcctcatgccatcttgatatacacacagctgcaagcaagtaaaaacatacatgacaatacgctagccatgaaattgcaagggcccaagatggcatgtggcctcatgccatttctaaatgtggtcctaaaccattccatggtgaacataccaggaagcacaagtgccgaatatcaagaggaagcggtagccacaccaaagacagtgtgtaagccaaaaaattttccttttcaatttgccagcttacctcgcctatccgaccaactctgccttggcttgtgctaagttccctcgccaaggttctcgcctatggtgccagctcctacttggtttcagctacttactgcacgagcaacggagtgttagccatccatctacggattcccaaatctctcccaatccccctccccgggttagactggacttaaggttcggccacactccccgcaggcacaagcagccaagcacaccaagcctccagattcctaacaccccaaggtaccacaaggcttgatcatgggaccctctaaatcccaagccttgggtgcagcacttgcttcgggacgtcggggcgaaacaccgtggcctaacggcccggtattggtacctctcgcccccccacttccatcccgaagggaaggcccaaggccccggaagggcgaggaccaatgagccacaaggtactcaagtggggcaccactccacctgagccgggagcaccgctgtcggtttccctttcgggagtgggagctgctcttgagcacttccttggatggcccctccggcaccagccaagtccatgctcactcccacccaaggcccctcggtcctagtcccaacctcaagtcggtttggaagcccaactggagagtcccttctaaactggttcctagacctcactatccctactatactttttgaaccccctgcagccccccccccctgggagacgcacgctttgggctttcaccccttgacccgtattagtatttggacttagtctctggctcgatcctcgacttggtcccatccgatgaactctttgtcatttcggtcaagcttttggggatcctttagcctacgacttcccgagaggtcacccagtccagtactattcaaacccaaggacacttaaccccaaatatcccaagacccttaaccgattggaaaagggggtgcactcttgttcatgggccctttccctctatatttgaaccccatggatcgtctctcaagtcgttccctttggttacttacaatccaccacgcttccctgcaagttcatgccctcgtgaacggaagctgagagccgcagctctcccgagagccccgctctcttgacaccctacccctcgggtcgagcccagcgggaacaaactggactagctagatgtcaatcaacatgtggtgtgattcccttagccaaccaacagagtcggacccaagaccgctctgataccaaatgtaagctcctgagtttggacttcccgggaggtcacccagcccagtactattcaaacccaaggacacttaaccccaaatatcccaagacccttaaccgattggaaaagggggtgcactcttgttcatgggccctttccctctatatttgaaccccatggatcgtctctcaagtcgttccctttggttgcttacacagtgccgctcgcaacatcgcaactactcgtagcgccgctcgcaacaccgcatctgctcgtagcgccgctcgcacaaactgccactcgcataaactgccgctcgcaatggcgcttgcaatgccgcaaccgcttgtagacgcataaaccacagctcacaacgccgcttacacaagcagcgctcactgcgctcagcggaaccaagaacacggcgcacaaaaatgatagacctaggaatgagttcgagaattcaaaaataacacacgcttgaacgtcacatcaaatcctctgacaaaccagatcttatgattcctctgacaaatttcaaactgagtagcttctagactttgctgtcggaggttgaactttgtcacatcatgtccttgcctcgatccagctgtgccatgtcagtgattcgaactttgccatgccatgtcagcgatccgcgccaagattattcgccgtgtaaaggaataattatgctgtgtgtgtatgtccatttatggcaatataaggccacatgccattcaaagaataatgctagtcgagcatcttttagtgcatttttgggttcaaaattgcatgagcccacacgctataaagtttacctgtaccaaaaatagaaacagctttatttacttgggaatttatatggttgaggcatttttaaacttacaaacacatgccctacttacattcctttggttgcttaaaattcaaaaatattataaacctttctttttgcattttcaatgttttcaattatggtttttgattttcgcaggactagcctagtaatctatttgcatcccgtcatgtttatagctagctttcgtttgtccccttcgctagcctgagatacatctgctcggcatctgcctcttacagcatttgcccagaaagggcatctttcttcacgcagcatttgccacatgtttagggttagggtttagggtttagggtttagcaattcagtagattgataaacatgcaaatacagaacttgatgcaaaatcctttgatatgtcacaatgcccctaggaccataaacacatttcaatagagagggtcctttcatttcataactccttacgtagatcttggtgaaaccagagttagtgaagttggtttcttgtgatcccgcatctgattgtgatgtccctttgcagtgtcgatggaaaggtcaatgcacaccaaactgtagaatcttggagcaaaataacggtcggatctatggcaaatgcccctgaaacattgtaaggctcgtgtggtctcatgtggtgtccgatcgagatgcttctttgcagggtcatcaagaaggacattgtataccattctgtaaaatctagttgcaatctaacggttggatctccaggaaactcaaaacaatctcgcgcgtgtcagaatattctaggaatatactcctatgtgctcctgaaaatggcatgcggccccacgccattcaagagataacgccagatgacaccaagcattttttggtgcattttttgggatcaaaattgcatgagcccacatgcttgaacgtcacatcaaatcctctgacaatttatttagctgaacatctggcatttttggaaatacaagatgctttggaatatccaatcatgcatggtataaatatagcgagggtattaaatgatatcccaatcatgatctttcttttggatttcgcgtgcatgcagtccgaggaatgatgacgttgcggatttcttttggatttcacgcatgcgcgcggcgatccagaaattaatggtggcgcccaagtccgagaaatgatgacgtggcgggattaccaaccgtcgtgacatttcgcacgtgtgaggttaggttttgcattttgcttcgtactcgcgctcgcatcgcgctcccactcgcgctcccacttctctacaggtttctcgtgtgcatcggcatccactcgcgcttgcatcacactcgcgctcgcatcgcgctcacatcgcgctcgtgtgcatcggcgtccacttcaagacacacccagtttgtaacttcgccgccaactccgccgcccactccgccacccacacgcagcccacttggcgtcccgggagatttcagcgccactctccaactgtaagtggcagagtagccttgctgctacgatccgctgcacacacagtgcacattcgctagtgagtccggttgtcacgcctccattcggcttcaaatggtaagtcttttaggccaagtagaaaatggcatgaggccacatgccattcagtagcaacattggcatgcaccgattgggctctcgagtgcagtgcggttacagatggcgtgtagcctcacgccatcttaggatgcagcctcaagacatctgatgcagtggtgaatggcgtgtggcctcacgttatttccagctactagcttttcatctgtcagctctaattgttgtgcatttctgaacaggcgaggaattgcgttcttcttccagcgactgtcaatgtggatgtagagaagggggaggagctcaccagttggactttcgggatggaaggcgaggatctgaggctgtacaacacagatggtgggagaaaagaatgcatggggatcctcatccaagtgacagacactccatgcagttccatgctagaatatggactggcacttgtggtagagacagcgtctgccttcaagatccaccttgcacatcctagtggcttcccggaggggggcagcggctatgaggaattcctagagggagctagggagaggttgtccaggaggcccacaatttcaaagacgctgcgggtctatgaagatcacatggaatccacagacctcacctacggcgatgttcaaaaactatattccaacattgagccgttgagagtgactccagttcgcgaagcaaaggggaagggggtcgatctggaaactacctcgaagcagaaaagggtggtcaagctcaagccgacgtccgactctcctgctccaaaaaagaagctactcagtgatgccattgcctcgggttcgaacactacacccaccaaaaagaagagccgcaaagagcagaaagagcaagaagaggcagcaaaaatcgtcgcagataatagtacttgttactattccaacaaagtatatacaatcgacgtgagccgtatcgacatccaaagcaaatacaaccacaggctagtatctgatgagtgggtggagaaactgaagcagaagatgctggcaagtccagtaacacccgacatcgcagacgtgatcccctactaccaaacaatgaagggcgagacgaggtttccagacttgatcaataggaaggtgttggacgatcagaacatccagttctatgccgtctccggacagcattctagcttggcgatgcaagagatagttgtggatattatggtgggcaaggaggtgaagaaagtcttcaagacaagagttgtccgcctgataaaaggcaactcgcccctccgatctatcatatacatctcccacgcgcagaatgtcaagcaagaaacgtgctacaaatcgggtctgcacgagacattggcacgaacacggaagctctgggttcaactgaagaagccacaaaaaccaggacaaggacgtgcactagcaactagcgcctggcaggtaagcctcgttgtatgtggcatagcatgtggcctcacgccatttccattgcaggaattctcgagtcttctctcgaaaacactggggtcaatgacacactcagcatccataacattctactcgcgacaaaagttgtttttgacaaatgggtagatgtgctgaggaggtaccatgacggggagttgccaaactcaatgggtgtggaggacggccagaagcccaatgatttgaagctcaacgccttgcgtttctcgcggtctctagacgacgacgaccttctgacagtggctaatgctcttctacgtggtgaggttgtcttcaacaagaccaaaatgactcccggccatattgtgacatacgaggacttgtgcacgactctgagagctcgtgcactattgaaggattggatcttcgagcaagtggccgtggagagggtgagcatcgacaccacgcaagagatgatggaagcgctggagttgtcaaatgaagacatcgacgagtacgtgaagggggcccccaagttcatcgatctgctgcgggatgccacgaaaagtaaagctgagaagttggatcagtatccaaatttcattaagattgatgtcgaccgccggcttcagaaacagctcgaccccgtagcagaggcctatcgagaaccttaccgggtatacttgaattcggatgaggatcaaaggtggaggagcatcgtttcccgcggagatgagcaggtcaagaacatcttttgtgtgatggacttcacaaacgaggagatcactcatgcagacgaagtcagctccatcattgacttaatggtgggacttgcggaggtggaatcttcaatccactatatgatctacgactccgaatcctatcacaagttctggaaggccttgaacgaggtgaaggcttggttgaaaggcaaggagatgcgggagatccatgggataatggctaagaagaagataccgacgaatgtccgcatcttcacactcgcccttgttattggtcctgcagcagagtgggactggagtgacttcccagcttcgttcaacaaggccaatcgaattgatctgagggaggtcaatttacccgtgcctgaggaactgaagacggctatggagctttcgaatccaaagaaagctccaggtgcagcatgggaaatgctcagctgggtcttcaacgcaatagcgggtgggtcacttgcttccgactccaagggcaaatgcgttgtcgagtacaactgcggcggactattctttcgagccgcactactcaagggtgtcccgtgtgttgtggtgacaaactccattgaagaggtgacttcaatggagcatataattacagttgccaaagaaaaacagtatcttctctgcgaacctggtgagtacgcactttaagtttaaatgttatctcacaagctctgtatgcaggagcgtggccacctccagatgctgaaacggcgttaacagctactgttgaagatacccatgttgggccgagctcacaacctgcacaaggtaaggtcacgtgaggcctcatgccattttgattatagatcgttgtgaatattcagacatgaggactaaaaagcgcactggtggcgcatcgaagaaggacaaacagacaagcaataggaaaaaaggaggtacaaattatatttgcaatggcgtgtggtctcatgccattccttgcaggagaaacttcttcaaaggcaaaacaggcaagcaccagccaagctcaaactgacagtggtcataaaaagcgaaagcacgttggacagtcgtcgagatcagaggcatttgattcgaaaaggaagaagggcaacgaaaagatgataggtaatgcctcgcggttatggcgtgtgtgctcatgccattcattgcagatcaagggctgagtgaaagcaggcagtcaccacctcatgactcagattcctatggcggactccccttccccaatctcaatagagaggtacaatggatgagggaagcttttcaagtcagggccacgtttttctcatctcgtcgtcttcgaagggtgcaagaacgtgcaaaaaccatgttaagacagtcgggtgaggatacggtcctaggtcacacactaaaacaggctatggatgtcttgtattttgagatggagactcggccagatgattttcccaagatggtcctggaagaacaagccatccagcctgagcagcctatggaagaaatgcaggagggggatgaggagccagagaaagataatgagcaggaagagcagaaggacgaagaggaggacaaagaagaggaggacgaagaagaggaggacaaaaaggacttggatggtcctcacaatggtgacgatcacaataacgacgacgacgatgatgacgacgatggccagcctgaggtggccaaagagcagcggaggaaggtcatacaagacaaaccatcaggtaaataataatacatccattcctaaccttttaccatttctaacattgtccatgtaggtcgcagagcaaatggtaagtagagattattcagttgaatttacaaactctagcctttagtgtcgaggaaggatagtgccaagcaagggtcgaaacgtatgtccaatccttcagaatcagcagtgcgctcaagtgatatcggtcctagttcctcaatagcagttgatggtaaatacagtatagtcgattcaatgtgctaatgagtttgtttttagtagcacgggaggataccatctcaatcgaagggagatatttggacatgcatatagatccgccagtggactctacttggctgcaagagtcatcagagctggtggaggctactatccatatcaacgccaagcaagctgaccacgctccacttgatgctgcccataccactgagtcaatcttgtccacgtatccaactgacggtgaccaagcgccattggacccacatgaggccgccccagccgccgagccggtcgtatcctcatttccaacggactcaacgtgtgcccaatcgtctgactacgcgccgttggaacctccctacaccgcccctgctgcctgttcggtcatgtccactttgccaacggaggcaccagctgaaatggcgtgtgatcacatgccatctgaaccaccccatgccactgttgagccagttgtaccagagtctacagctgaaatggcatgtgcccacacgccatcggatgcgattgaccccacattgcagaggagagtatttccgcccttcacgtttcctcgaccaaaaccctctcaacgaccatcgggagcaacattcgctaatattgtagatggtaaaattgacttgtaccattttttatgctgatgcatttcatttcagagtcacggcgaaggtactgtatcgtttttgatctgaacggtgtccttttctcccatgagcgtggctcgtcctcgaatgtcattgcaccctccaaagcctgcggtcgcaagttggtcaaaagagacagattcacattaatcacacgggagaaactgcgggatctaataatgaccatgcgacacttaaaacagagggccgggttcaatttgcaattgggagtttggacatccatgatgcgccacaatgcattaatgttgctacagatgatgcacgatcagacgcgagtaatattaccatttgactttctcctaacgcaggaggattgcttgactatggtccatgtgaggggtagcaagcccatcttcgtcaagccaaaggctgtagtgatgaaccggactgctagctcaagtgaaatcctcatcatcgatgactcgccgattaaaactgcagcgaacacgcacacatatgcagtgcaccccatctcttgcagtatggaaactagggagaagaaaccgtatgttctgggggaccttgcaaaacggtttggagcgatggtgatagagaaccggtcagtccagtgagaggatttgcattatactagaagtgttacagcatgttattggaagtctacgaagttgttttattaataatgggaaagtaaagattgaatggggacttgggctccacctagactcggagcaactgagccaatattaaaaggatggaaagaaattggacgacgatgacaaggagaagagagaggtgaagcagtggcagggggaggagaagtgattgagtagacatttccttgtttaaaataaaatggcttgtgcctcaatgcagttgaattttgttatatttatatactatataaaggtttggaaaccttattttacaagtgggataatgacaattcccactttaacgaaatagagctttattggctcagttgctccgagtctaggtggagcccaagtccccattcaatctttactttccccttattaataaaacaacttcgtagacttccaataacatgctgtaacacttctagtataatgcaaatcctctcaaagaattgtcttttaatattaatacaatggcatggaaccccatgccataataagttacatttttaaataaatacatgccatctcagactgttattttttgcctccaacgcctatacaataatcttggaatttcatcactctccacactatcaggatttaaacccaatagtaatgccatctcttctctaatacgtccacgctcatgttcagtggtcaaagaacccatccggttgagcagattatggagatgcggatagtgcttggctagaaattatacatgccataaatgatgactggtgtctgtccgatcaaatggcttctgatataccgttccatctgccatttggttgatttctgcagccacctcctggactggccggttctctatcaccatcgctccaagccgttttgcaaggtcccccagaacatacggtttcttctccctagtttccatactgcaagagatggggtgcactgcatatgtgtgcgtgttcgctgcagttttaatcggcgagtcatcgatgatgaggatttcacttgagctagcagtccggttcatcactacagcctctggcttgacgaagatgggcttgctacccctcacatggaccatagtcaagcaatcctcctgcgttaagagaaagtcaaatggtaatattactcgcgtctgatcgtgcatcatctgtagcaacgttaatgcattgtggcgcatcatggatgtccaaactcccaattgcaaattgaacccggccctctgttttaagtgtcgcatggtcattattagatcccgcagtttctcccgtgtgattaatgtgaatctgtctcttttgaccaacttgcgaccgcaggctttggagggtgcaatgacattcgaggacgagccacgctcatgggagaaaaggacaccgttcagatcaaaaacgatacagtaccttcgccgtgactctgaaatgaaatgcatcagcataaaaaatggtacaagtcaattttaccatctacaatattagcgaatgttgctcccgatggtcgttgagagggttttggtcgaggaaacgtgaagggcggaaatactctcctctgcaatgtggggtcaatcgcatccgatggcgtgtgggcacatgccatttcagctgtagactctggtacaactggctcaacagtggcatggggtggttcagatggcatgtgatcacacgccatttcagctggtgcctccgttggcaaagtggacatgaccgaacaggcagcaggggcggtgtagggaggttccaacggcgcgtagtcagacgattgggcacacgttgagtccgttggaaatgaggatacgaccggctcggcggctggggcggcctcatgtgggtccaatggcgcctggtcaccgtcagttggatacgtggacaagattgactcagtggtatgggcagcatcaagtggagcgtggtcagcttgcttggcgttgatatggatagtagcctccaccagctctgatgactcttgcagccaagtagagtccactggcggatccatatgcatgtccaaatatctcccttcgattgagatggtatcctcccgtgctactaaaaacaaactcattagcacattgaatcgactatactgtatttaccatcaactgctattgaggaactaggaccaatatcacttgagcgcactgctgattctgaaggattggacatacgtttcgacccttgcttggcactatccttcctcgacactaaaggctagagtttgtaaattcaactgaataatctcttcttaccatttgctctgcgacctacatggacaatgttagaaatggtaaaaggttaggaatggatgtattattatttacctgatggtttatcttgtatgaccttcctccgctgctctttggccacctcaggctggccatcgtcgtcatcatcgtcgtcgtcgtcattgtgatcgtcaccattgtgaggaccatccaaatcctcttcgtcctcctcttcttcgtcctcctcttctttgtcctcctcttcgtccttctgctcttcctgctcattatctttctctggctccttatccccctcctgcatttcttccataggctgctcaagctggatggcttgttcttccaggaccatcttgggaaaatcatctggccgagtctccatctcaaaatacaagacatccatagcctattttagtgtgtgacctaggaccgtatcctcacccgactgtcttaacatggtttctgcacgttcttgcacccttcgaagacgacgagatgagaaaaacgtggccctgacttgaaaagcttccctcatccattgtacctctccattgagattggggaaggggagtccgccataggaatctgagtcatgaggtggtgactgcctgctttcactcagcccttgatctgcaatgaatggcatgagcacacacgccataaccgcgaggcattacttatcatcttttcgttgcccttcttccttttcgaatcaaacgcctctgatctcgacgactgtccaacgtgctttcgctttttatgaccactgtcagtttgagcttggctggtgcttgcctgttttgcctttgaagaagtttctctttcaaggaatggcatgagaccacatgccattgcaaatataatttgtacctccttttttcctattgcttgtctgtttgtccttcttcgatgcgccaccagtgcgcttttcagtcctcgtgtctgaatattcacaacgatctataatcaaaatggcgtgaggcctcacgtgaccttaccttgtacaggttgtgagctcggcccaacatgggtatcttcaacagtagctgttaacgccgtttcagcatctgggggtggccacgctcctgcacacagagcttgtgagataacatttaaacttaaagtgcgtactcaccaagttcgcagagaagatactgtttttctttggcaactgtaattatatgctccattgaagtcacctcttcaatggagtttgtcaccgcaacacacgggacacccttgagtagtgcggctcgaaagaatagtccgccgcagttgtactcgacaacgcatttgcccttggagtcggaagcaggtgacccacccgctattgcgttgaagacccagctgagcatttcccatgctgcacctggagctttctttggattcgaaagctccatagccgtcttcagttcctcaggcacgggtaaattgacctccctcagatcaattcgattggccttgttgaacgaagctgggaagtcactccagtcccactctgctgcaggaccaataacaagggcgagtgtgaagatgcggacattcgtcggtatcttcttcttagccattatcccatggatctcccgcatctccttgcctttcaaccaagccttcacctcgttcaaggccttccagaacttgtgataggattcggagtcgtagatcatatagtggactgaagattccacctccgcaagtcccaccattaagtcaatgatggagctgacttcgtctgcatgagtgatctcctcgtttgtgaagtccatcacacaaaagatgttcttgacctgctcatctccgcgggaaacgatgctcctccacctttgatcctcatccgaattcaagtatacccggtaaggttctcgataggcctctgctgcggggtcgagctgtttctgaagccggcggtcgacatcaatcttaatgaaatttggatactgatccaacttctcagctttacttttcgtggcatcccgcagcagatcgatgaacttgggggcccccttcacgtactcgtcgatgtcttcatttgacaactccagcgcttccatcatctcttgcgtggtgtcgatgctcaccctctccacggccacttgctcgaagatccaatccttcaatagtgcacgagctctcagagtcgtgcacaagtcctcgtatgtcacaatatggccgggagtcattttggtcttgttgaagacaacctcaccacgtagaagagcattagccactgtcagaaggtcgtcgtcgtctagagaccgcgagaaacgcaaggcgttgagcttcaaatcattgggcttccggccgtcctccacacccattgagtttggcaactccccgtcatggtacctcctcagcacatctacccatttgtcaaaaacaacttttgtcgcgagtagaatgttatggatgctgagtgtgtcattgaccccagtgttttcgagagaagactcgagaattcctgcaatggaaatggcgtgaggccacatgctatgccacatacaacgaggcttacctgccaggcgctagttgctagtgcacgtccttgtcctggtttttgtggcttcttcagttgaacccagagcttccgtgttcgtgccaatgtctcgtgcagacccgatttgtagcacgtttcttgcttgacattctgcgcgtgggagatgtatatgatagatcggaggggtgagttgccttttatcaggcggacaactcttgtcttgaagactttcttcacctcctcgcccaccataatatccacaactatctcttgcatcgccaagctagaatgctgtccggagacggcatagaactggatgttctgatcgtccaacaccttcctattgatcaagtctggaaacctcgtctcgcccttcattgtttggtagtaggggatcacgtctgcgatgtcgggtgttactggacttgccagcatcttctgcttcagtttctccacccactcatcagatactagcctgtggttgtatttgctttggatgtcgatacggctcacgtcgattgtatatactttgttggaatagtaacaagtactattatctgcgacgatttttgctgcctcttcttgctctttctgctctttgcggctcttctttttggtgggtgtagtgttcgaacccgaggcaatggcatcactgagtagcttcttttttggagcaggagagtcggacgtcggcttgagcttgaccacccttttctgcttcgaggtagtttccagatcgacccccttcccctttgcttcgcgaactggagtcactctcaacggctcaatgttggaatatagtttttgaacatcgccgtaggtgaggtctgtggattccatgtgatcttcatagacccgcagcgtctttgaaattgtgggcctcctggacaacctctccttagctccctctaggaattcctcatagccgctgcccccctccgggaagccgctaggatgtgcaaggtggatcttgaaggcagacgctgtctctaccacaagtgccagtccatattcttgcatggaactgcatggagtgtctgtcacttagatgaggatccccatgcattcttttctcccaccatctgtgttgtacagcctcagatcctcgccttccatcccgaaagtccaactggtgagctcctcccccttctctgcatccacattgacagtggctggaagaagaatgcaattcctcgcctgttcagaaatgcacaacaattagagctgacagatgaaaagctagtagctggaaataacgtgaagccacacgccattcaccactgcatcagatgtcttgaggctgcatcctaagatggcgtgaggctacacgccatctgtaaccggactgcactcgagagcccaatcggtgcatgccaatgttgctactgaatggcatgtggcctcatgccattttctacttggcctaaaagacttaccatttgaagccgaatggaggcgtgacaaccggactcgctggcgaatgtgcactgtgtgtgcagcggatcgtagcagcaaggctactctgccacttacagttggagagtggcgctgaaatctcccgggatgccaagtgggctgcgtgtgggtggcggagtgggcggcggagttggcggcgaagttacaaactgggtgtgtcttgaagtggacgccgatgcacacgagcgcgatgcgagcgcgagtgtgatgcaagcgcgagtggacgccgatgcacacgagaaacctgtagagaagtgggagcgcgatgcgagcgcgagtacgaagcaaaatgcaaaacctaacctcacacgcgcgaaatgtcacgacggttggtaatcccgccacgtcatcatttctcggacttgggtgccaccattaatttctggatcgctgcgcgcatgcgtgaaatccaaaagaaatccgcaacgtcatcattcctcggattgcatgcacgcgaaatccaaaagaaagatcatgattgggatatcatttaataccctcgctatatttataccatgcctgattggatattccagagcatcttgtatttccaaaaatgccagatgttcagctaaataaattgtcagaggatttgatgtgacgttcaagcatgtgggctcatgtaattttgatcccaaaaaatgcaccaaaaaatgctcagcgtcatctggcgttatttcctgaatggcgtggggccgcatgccattttcaggagcacataggagtatattcctagaatattctgacacgcgcgagattgttttgagtttcctggagatccaaccgttagatcgcaactagattttacagaatggtatacaatgtccttcttgatgaccctgcaaagaagcatctcgatcggacaccacatgagaccacacgagccttacaatgtttcaggggcatttgccatagatccgactgttattttgctccaagattctacagtttggtgtgcattgacctttccatcgacagtgcaaagggacatcacaatcagatgcgggatctcaaaaaaccaacttcactaactctggtttcaccaagatctacgtaaggagttatgaaatgaaaggaccctttctattgaaatgtgtttatggtcctaggggcattgtgacatatcaaaggattttgcatcaagttctgtatttgcatgtttatcaagctactgaattgctaaaccctaaaccctaaaccctaaccctaaacatgtggcaaatgctgcgtgaagaaagatgccctttctgggcaaatgctgtaagaggcagattccgagcagatgtatctcaggccagcgaagaggacaaacgaaagctagctataaacatgacgggatgcaaatagattactaggctggtcctgcgaaaatcaaaaaccataattgaaaacattgaaaatgcaaaaagaaaggtttataatatttttgaattttaagcaaccaaatgaatgtaagtagggcatgtgtttgtaagtttaaaaatgcctcaaccacttaaattcccaagtaaataaagctgtttctatttttggtacaggtaaactttatagcgtgtgggctcatgcaattttgaacccaaaaatgcaccaaaagatgctcgactagcattattctttgaatggcatgtggccttatattgccataaatggacgtacacacacagcataattattcctttacacggcgaataatcttggcgcggatcgctgacatggcatggcaaagttcgaatcactgacatggcacagctggatcgaggcaaggacatgatgtgacaaagttcaacctccgacagcaaagtctagaagctactcagtttgaaatttgtcagaggaatcataagatctggtttgtcagaggatttgatgtgatgttcaagcgtgtgttatttttgaattctcgaactcattcctaggtctatcatttttgtgcgccgtgttcttggttccgctgagcgcagtgagtgctgcttgtgtaagcggcgttgtgagctgtggtttatgcgtctacaagcggttgcggcattgcgagcgccattgcaagcggcagtttatgcgagtggcagtttgtgcgagcggcgctatgagcagttgcggtgttgcgagcggcgctacgagtagttgcggtgttgcgagcggcactgtctttggtgtggctaccgcttcctcttgatattcggcacttgtgcttcctggtatgttcaccatggaatggtttaggaccacatttagaaatggcatgaggccacatgccatcttgggcccttgcaatttcatggctagcgtattgtcatgtatgtttttacttgcctgcatctgtgtgtatatcaagatggcatgagggctcatgccaattttgtaaatgcgaaatttcacgtgggtgtcaatagcatgtttgaataatgatatgtggcctcatgctatttggtatgttatgatttaggccattctccaatcattttttgtatggtcttaacttcttttctgcactttcagaatggccttcagggttggggaaaaggtttacattttgaatggtgggaagagagttgcaaaagggacccttgtgtctatggattggaactttgttatacactgtcaaaagcttggggaaggcaatgctgctgtatcagtagagactgtcttcgatgggaatgtggtcgctattgaacgaggagagatggtcgtcggggtaaatgttgttgttgccttgaaaaatctgtagaagaaagcagatgttggggacagcgcaagtgcgacgcatgttccctccgtggatcttaagaaccatgctacatggattcaggcaaaggtgtttctaaacaaccccgagggggaggtggtagctgagggcttagccacagttgtcgatccaagagatgcagttgctaatcaagaattgggctgggatgatattggagttgcgattttagaggttgttgacacagaagaaaacagtctaactattggaagcattgtgcggtggaaattgaggcatttagtgtttgagaatgtgaaggattcacaatcaaataccactacaattgatgacagaacatctcttcatgggaaaagaaagtacaccttcctacagcgcagccaaagggatctgagcaacgaaccaaaaaggcagaaaatggcgatggaggttcgaatggtctcgacagttgcttgttgcaagaggaggtgctgtcaacatgctgattgggatgctattgaagaggagagagcaagatacaagacattgtcctggaaggcagctcgcaattttgtgtatgaggcattacggtcatctgttgatgcttcagaacatcaagtggggggcatggtcttccagaggggtttggtctgcatgaaggcatggagaatcatttatggagtccctcgaagcacattctacagaatcaaaactgagttcgaggaacaaagggttcaacaggcagtccatgggaacgacggtacgcacaaaaccaggggtcatgttgtatatggagaggcaatcttcaagaggtttgtcgagacatgtagcgagcagcaaccacataaaacccgcctcttggaagatggaacacgagacacccaacgagttctcccttccatgtataccaagggggccatattggaagatgtgaatcgggaactccagagtaatggctacaggaagctgagccaatctaaatttagtagattgtggagcaacaggttcagggatgtgagtataagaaagtactccagcttttcaaagtgtgacgagtgcactgctatcaaaatggctttgtcgaagaattcttgcagcgctcaagagcgagagacgttggttagaaggcggctcgaccacaacatcgagcagagaagctgcaggactgcatattatcataacaggattctctccatggagagacctgactcttacctctgcatcatccacgacaaaatggaccagaaaaagacgtgcttacctcgactcaatcctgcccccaaggcaatcttttcatccatgcagctgcctgtgtctctgtttggcataatcgctcatgggcatggtgcccagaactatgggaacttctttgtacctctatggggtggcgggggtgcaaacatgatgattgcgtccctagcaaaacacttaaggtctctgcaaagtgcgcagactgagctgaacggccaacccttgcataaggcccttgtcgatcgaaccccatacagggttcagctggaggaggagcaaaggcttgcagtatcgcatggggccccatgccatcccagtgaatatgttggccgtcagattgtagggttatcacgtgaggcctcatgccattccgacgaggctggtcgcccggtgaatgcacagcctcatccaaacgaagcagaatctcaaggaagttcttgcggccgatgtggccttccaccccatcttctgctccaaacagacaatgctggcagtgagaacaaaaacatgtacgtcttcgcgtacttagcgatgcttgttgccaaaggcatatttgaaatggttacacttggctttctcatggttgggcacactcatgaagacgtcgatgccatgttcagtcacctggcagagtccctccggcgatccaatgtcctcaccctcccacaactctacgatgaattccaaaattgtatcaaaggcactgttgaagctgcacttgtgacagaggttccagactttaaggggtttgtaagaggctacatcagggacggatccgaaacgctgattggccactccaagcctcttcagtttcatttcagcatgcatgacggtgctccagtgatgaggtacaagatgagagaatgggacacagtgtggctgccagtggatggcattgaactcttcaagagagatcccataactggggaacctatgattcctcaaggttccccacggccgatgcacccggatggactcaaagaccaggaaagtatagtggccgggattagacagcatattgccttctggaagagggggttggtgtttggtggagaatcctattttaagaggtgcaagcctttgctcgaatactgggagaagattatatctgctatccaaaatgggccggttgtatatgaagaattggaagagtccttttggccagaacccagagcactagatagtagcggaacaatgtcctctggaaatgcagtgacagataacgatgttgaggatcactattgtgggccgaggaacaagaagccggattcagcattcaatccagtacaggtctgcaaaggaatggtcgtgcttgtcagacccagtaataaaaaacaaatgatatgggtggggcgctgcatcactgatgcagaggaggacgtggaaactaactccttcaatgtaactgtggagtggttcaagccaagttccggatatacgaaggattgcctagaaaagagatgggtgctgaatccaagggatcccagcatgagcatatcggtggataatgttgtgcatggttggatgcggaagcagagtgccaccatcaccttgccagaccatgcaagagatgcagcaagagcattcataacctgggttcaaggtgagattcattaatattcctttactaagtttctaatgtattttatttcaaggtgaacaatccgaatctgaatcagaggaggtgtgatggcatgtggccctttgcactagtatatcttaataccggtctgagaaatagaatggcatgtgctctcaggccttttactaaatcacctttgaaaaaaatgcaagcctctatgtcgtaaaaaaaaggtactagagaaattccttaataatatgaatgttatttagtttcatgaaaatacactaagggtcaaatgagttaaatgacttctccagactagcaatgcctcttgctacaccttcacaattagattcgttagaaaatgataacattgaataatatctaaatgttctcaccattaagttatatgtctggctaataggaatgacattcatcttggaaagctcaccacacgctcaataaacaaacaaatagtgtgtgtgcgcatgccatcgctcttctttagcttcagattcggcttgttcaccttgacaatgagatttattatacaaccagatggactcagtctggacacaaagtcaccgcgctagtcaccatgccccagatatgtctagcccctggacaaaaaacatataatttcacgtcattttcaaatacttgaaaatttgtacctagtcccattttactgaataaatcccactttaacgaaatagagcttctcggagttatttcctggaaggtttaagttcactttctcgaaatgagattttgaagtttaagccgaagacgtacctggagtgtaaagaggcagcgcagcaagttgcctttagtcactcgctcatagaacaatatcagctatcgtatgctggtaactcggacaagaataaaaattctgggaataaacaaggtgaccggaaacaaagagtggaaggcaggttctgccctggagtctcacaagcaacagttaacaaaggtggtggtggttggagaccaccagcagcttcttctggtcctaggccctctgttcctcctcctggtgggtacaagcagcagcaacctgcaaaatctgctcctagcggaacgggtagtgtgggtcattgcttccattgtggagagttgggacataggtctttggaatgtcccaacaatcataagacaaggtctcgggttaatgtcatgagggaagacggtggtggtgaagttgaaggggttgacgagttggtcaatgcagactatgaggaagaagaggtgagtaactttcgttgctttcctcaagcttttcttgcagtcaatgcaaacactgatccgttgatgtatctggtaggctttgtccgtggacaccaaatcctagtgatgattgacacgggagctacgcacaatgtgatatccgaagacttagttaagttgttaggattgaatgctgaacaaatgtcgcctatgcacttccggtttgcggaaggtgggcaagtagccagaaagtttgtgagtgatgttccaataaagatatccaagtggaaagaaagagtggacttggtagtgttgaagataccagattttcagatggtgtttggtatggatttcttcaacaagtatataaaagggatttatggtgctagacaaagtcgtatcatgttgaagtcaaaaggacatcctgatgtatcctttcagttgcaaaagcgttcctcaaaagattgggatgcaaagttcctaactgcgaaggccgctcaaaaagcagctaagaggggatgtcagaccttttgggttcaagtgatggaagctgagggtattggtgactcagttcgaatcagcgacagggttgatcccataccaaagaagatattggagttgttggcgaggaatcaggatatcttcccgaaggatttgccgccagggctacctcctagccgtgaggttgatcattggattgagattattctgggttctaaaccacctacgaaagctccatatcggttgaacatcaaggagatggctgaactcaagaagcaactcacggagcttcttgacaaaagtcatatccgaccaagcaagtcaccttatggagcgccagtcctttttgttatgaaaaaggatggaaccatgaggatgtgtattgactatcgggcactcaacaagatcacagttaaaaatagttatcctttgcctcgcattgatgacttgtttgactaactcttaaaggctaagtattttatgcgacttgatttgtggtccgggtatcattagatacgggtggcaggtcaggatgtggagaagacagcctttaagactcggtacggatcttatgagttccttgtcatgccgttcgggttatgcaatgctccagcaacgttcagcactataatggatagaatattcggagattatttggatgcatttgttgtcctatatatcgacgatgttctagtctttagtgaaacgttggaggatcatttgaaacacttggagctggtgtttcagaagttgcacgaacacaaactgtatgctaaggaaagtaaatgcgcttttggacaattgcgcgtaaactttctcggacatatagttggtggtggcgtgattgaggtcgatccaaagaaggtggaagcagtgaagtcctgggaagttccaaccactgtatcaaatgttcgatcctttctcggtctggcgggatactatcgcaagtttgtccgtaattttgcaaggattgctcttccgttgactgagttgacaaagagtaatattccgtttcattggacaccagcttgccagcgtgcttttgcacggttgaaggagatcttgactacagttcctgttctcaagatcccagatcttgataaacctttcgaagtgcattgtgatgcatttggctatgctatcagtgccgtgatgcagcaagattgtgacaaagcggttggtgttatgctaaggcgacatggttgtcccgttgcattctattccaagaaattggatgaaattcaacgaagatggccaacgcatgagaaagagatgtttgctatagtgtcggccttggaacactggagacactacttgggtggacataccaaggtttatatagatagtaacacattgagctactttgctacgcagcctaagcttacgccgaagcaggctcgttggcaagagaagcttgctagatatgatattgaaatcatatataaacctggtaaggacaatattgttccagacgcgttgagtcatcaggctcagtttcgggcaatattggcaagcagttcggactggttggtggacgttcgggcttcatatggaagtgatccattggcgaaggcaatcttatgccgcgcggggttgttgaagcagagctctggtagcgaagtagcaaaagttgctagtcgcactaatgcgaagcttcacttctcagttcgggatgggcttatattctataagcaagaaagattgtatcttccctctaaggatctgcagcagttatttctgcgggaacatcatgatgttccagcagcgggacatggtggacagcaaaagactcttgcttcgttgaaaaagggatttttctgggctggtatggaaggtgatgtagcggactatattcgttcttgccctatatgccagcaatgtaagcatagaactgagaagcaagctggaaagttgcagtgcattccagcaccggcatggccatttcagagtgtgacacttgatttggagccgaactccaagcccgttgcgctacgaaacgagggtccggtacaatcccacgagcaccagctccctgcctctctctcgatgactccttttcgaaaaagaggcgtggtcgtctaaacaacttaatttgccagtttataatagttgtctaaatcttcccgacggggttgatttcttgctcaagggtagttgggcctctggccttctccctatatccctgcaggcagggatgtatcattcctttgtaagctgagtggtactcggagcagcaagggtggctaactccgttggtcatttccttgtcggcgacggccggagggtgtctgggtcttaacgtctttggacgtagaggagaggtcgttccataactcatttaagtcggtgtatttcccacataatgtgctttccgttaactttcgaagttgtttccttgacggtttgctagactcgggtatgcatcgacgaggacgtcgatcttccccaagggggggagagtgtcgcgaatgtgactttgggtatcgaaagatacttgtcggcctgtccttacgggcactctttccttactgccacgacggcaggaggtcggtactgctggtcccttttatagtctccactcaagctagttgagaaactggtcatcgcatgtgcacttgaccagatgagcataagggtttacctaaaccctattcgattgatgatagcttaccgtgtctaccaaacaccctcgctatcatgcccttagtgttggtctcatttcggtcccatatgctatttatggaaagtgtctagattcgctcatttggcatatctacagaatgtagagatcggcctgaacacaatagtgttcgtcccgtgtccaaattcgcaatctaaggccattccatatttagtaagtttcggacttgtcctagagactaactcctggtactaagggaggcttggggtgaaagcccaaagtgtgtgtccctcaagggggggggagctgtggggggttccaaatgtatagtagggatagtggttggaatgcatgtccgaccacctgagacattagtttggctcccactaggctgtgttgctccttgttctgcgtccggcttgggtctaagcccaagctccacgctgctctagtcggtggagtaccctcctcctcgcgttaggccaccggtatgccaaaattgtgccagactccgtctgacaccattttgcgtgcaggtgctggatacggggagctggtgctcgtgggattgtaccggaccctcgttttgtagcgcaatgggcttggagttcggctccaaattcaggtgcgctacacagatccactccttagcattcttaggatgcccatagacatggggaatagccttccccaaaatcccttttttggtccccaccaagtccctttctacctatggccgtgttcaccaacattgccattggatcaaggcccacaagcccgaccactgagtcccatggtcctatgggacttcctcaccacacgactgtatccttggtcactacaccagaggactactcctcttcctttccacagtctgggcctttgggataacattttggaacacacaaacctcataggtattctccccgccttctacatttgggtgctctagccatgggtttagagtgaggttccgttgagccacgccaggtatccaagtaggtagtgccacccacacttggactgggagcattaaccattcgatctcccgagggaactagagtcggctcttgaacacttcaccaagctacctaacttgtcggtccatattcactttagtcttggacttcccagtggtcaactcatcacccaacacctgggtatagccttcctgagccaaactagctccattgggctccaactctctactatacttttggaaccccctaaagcccccccccccccccctcgggggggatgatcgctttgggctttcacccaattgcctgtattagtattcggactcggactcggactcggtcttagtcctagtctcggtcccggtttcggactcagactcggtctcggtctcggtctcggttccgtctcagactccatcttgggtccatctcggactccatctcggatacttccacgtgtcatgtgttggtccttttgggtcccttttggagcctcgcttattgctcgcttcgtgctcgttcctcgagcactttgttgggagttccactcccactctcgacctttcaagttagagtttttagtccaaatgtgttatgctcgtttagctttcgcttcggccactaccatgtggcacccttttggctccactttagggcttagagattttgtgtctcacaactccaccacccatagacgaaattcgatgtcctcatcgaatgataaactattttataaagtaatactaacatgtattaccctttccattcttagcaccttgccaatattcatcaatggtttgataccgaaggctcaccacgccttgttcatcctccaaggagcatagtctttccaacttagagactgtttggaccatttgtagtggttttctccttttattggtttagttctcattaaacctgttaaagacaccgtctctatcttgatcccactactccttctcgagtaatctcaatttccatcaatataacctttgcacttgaaacttttacttttgacttcttgaaatcaatttcctaggtgtctccgacaccttgcacatattgtgcaactccacttccccatcctaggaagttctttacttgagggcaccatcatcctctcttctatttggtgccaccttgagtgctaagttccaattatttaatttgtgctagggctgtctatggccctatcatttggctaccataccgctcattgccttggagcttccactttcaccaaattggaacaatgggaaatccatccttggaaacatattgcctttcccaccattcgttagcacccaacacatagtgttcttagcgtaatttgcctttctaggttcttgcccatgatttctatggctcttttcttagccactagtcttttgctcctatccttgattgttgcacccagcaacataggattgctacttccaatcttgaggtatccttttagttctatagcaaagattttgctttgccaagtccagaaggtgttcacctttagtatgtctctttagcatcttttgttgtgggctctattcatggcctaactttgagaccatcctatgggtcctttatagagactactttcttcggactcattatgccattgcattaacacagttcattttccttaggtgtttttcccacttggtcaccttgaccaagccacaccatcatcaatagttcaaatcaacactttgaactaggaactttattccttaccctcacaaggacctcgtccttgttttagctataagatcacctagtgatcaaaccttagcaacaggtttgccaataagtattaggtcttctagacctttaagttgtttaccatgaccccgggggcatcccccacacttggcggtgcacccaagccatcccttccggccaagggtccatagcaactgagactgggtgtccccatctcattcaccacgcccttaatgctacttgcaccaaagtgttcaagttagatatgctgagacattaagcaatctaactgtgcatcatgactccggagcatcccttgtttggcggtgtgcccaagctagtctccttattaaaagtccatgaccaccgaaaaatgagtgtcctcatattccaaaccatcgcctcgctctagtgagttgagactcgaacccaagtactaaagggttgggacttgaactcaacctttgtatatgcatttacggatggcatcacacaagatgccttgtgtgactccccacaccggtgcatcaatatgtacttaaagcatactataaatcacagattaggaacttggttcctttgcactgccaagtcctctcatttggcaagtctgtgatcatgcatggactcctccatgcttggccccatgggccactccttttgaagttagcaccttcgactaggggatttgttcccctgacttgccaatttcacttagcaagtcatccagccaccataacatggttcatgcataaatgtgaaagtccttaaccatcgagtttcgttcaaagccctctctttgaacactcggaaactacttccccaaccttgatagcctcgcctcatggccagtttcaagatcacgcttctgctgcgccactctgatttcgcacgctctaggaaccatttacacttggctttctaggtacttatctacctagaattgtctttggaaaccttcaaggaactctattccttagcttgctaaagcttctcttttgtaagctccctactcaccatatggtttaatatggataattccacattttatactctccatggcattgcgatgtctagtaataacatcctcgagcaccctcttgattctccactcccaacttgcataaccaccgtggttatgccttttgatttctatggtttagttccatcccaatactacttgccttttggcctcatatgtttcctttggttattctcctccagactaagaggatagctttgcacgttctaccatgccttagcaagtattcatagggatgaacctacctgatagcttagggaatggttctttaatttgggcatactcaccttataatcccacacaccgggattaccgttgctacttatgggcctctatatgcccatcattaacctgtaagccacaaattttttcttttcaatttgctagcttatctcatctatccgaccaacattgccttggcttttgcgaagttccctcaccaaggttcccgcctattgtactagctcctacttattcctacttggtttcaactactcactgcatgagtaacagagcgttagccatccatccacggattcccaaatctctcccaatccccctccccgggttagactggacttaaggttcagctacattccccgcaagcacaagcagccaaacacaccaagcctccaggttcctaacatctcttggtacaacaagacttgatcatgggaccctctaaatcccaagccttgggtgcaacacttgcttcggaacatcagggcaaaacactatggcctaacgacccggcatgggtacctctacccccccacttccatcccgaagggaaggcctaagcccctaggaagggcgaggaccaatgagccacaaagtacttaagtggggcatgagccgggagcactacagtcggtttccattttgggagtgggagttgcttttgagcacttccttgggtggccccttcggcaccacccgagtccatgctcactcccacccaaggcccctcggccccaacctcaacctcaagttagtttggaagcactactagagagttccttcaagactagttcctggacctcactattcctactatactgttggaaccctctacaaccccccccccaggagatgcatgctttgggctttcaccccttgacctgtattagtactcggactcgatctcggacctgacttcggactcggactcggactcgatctcagactcaatctcggacccgatctcggacttgacttcggacttgacatcgaactcggtcttggacctgatctcggatctcagactctgtctcgaactcggtctcaaactcagtctcgaactcggtctctgagtcggcctcggactcgaacccggactctatctcaaactcagtcttagagttggtcttggactcgatctcagactcggtcccataagatgaactctttatcatttcagtcatgcctttggggatcctttagcctacaacacctcggggagttggttccttacataaccttgccaaaatcccatttttggctttgtccaaattgggtagacagatttctcccgtttccagaatcttggatatttggatagcaccttttatccatcatttgctagagacttagtcccttaggcattatctaatgtcttcgcgacactaaacaccacttcctggtgttttaaagtgtttgggtgtcccaatgatggctttttttggcaatgagtattccctttacgacattgacttattatattgcaatataaatagtttctcccccataagggtatatctaacttccttatcccaataagaagtcttaggtagttaccttctaccaatttaactaattattttgcacctttttcttagttgcctcatagttgtcaagtcctataactcattgctagtgcttctacacctccatcattatttgggtcaccacactctaattgcataccttctagcttaggctatgatgtttctatcttgttctgttcttccctttttcaatccctctgacaatctttgtgttgcagtagttgaccggctcatgaaggagtattctgatctctttgaatttgacctattgtctggggctaaaattgccacatgtcatccgattccaactggggatgctcgtccaatcaaggttcttgttcgccgttggtcatccaaggagattcaaggagatgttagagaagggtgttattcggaaggggcatgtgaatttcatcttgtgacgaagcctgatgggagtattcgtttctgcatcgactatcgtccattaaacgaagtgacaatccctgatgtgtaccctcttcctcacattgctaatcttttggatcgtctggggcaaaatcgtctacaaggggttccaaaagtatagtaaggagttggagcccaatagagccagtttggcccaggaaagatgtacccaagtgttgggtgatgagttgaccactgggaagtccaagactagagtgaatatggaccgacaagctgggtagcttggtgaagtgttcaagagctggctctagttcccccaaaggatcgaatggttaatgctcccaatccaagtgtgggtggcactacctacttggatacctggcgtggctcaacggaacctcactctaagcctatggctagagcacccaaaggtggaaggcggggagaatacctatgaggcttgtgtagggctacggtgttccaaaatgttgtcccaaaggcccagactgtggaaaggaagaggaatagttctctgatgtagtgaccaaggatatagtcatgtggtgaggaagtcccataggaccgtgagactcagtggtcgggcctgtgggcctcgatccagtggcaatgttggcaaacacggccataggcagaaagggacttggtggggaccagaaaagggatattggggaggctattccccatgtctacgagcatcctaagaatactaaggagtggatctgggatgatcactcatggatggatggcccagtccttgagagacgggattgtgatgcaggtggtgttagaccactagtgtgaccaagatgaaggggcatggccttagtgtaacaagctgatatgttaatggtaccttggggtgtcagtcatgggatcggacacgtggagcacttggaccaagtgcaaaggttgagtggcggggatgccattcttgctagcaagcccaagtccgaaataagacttatggaggttgtgagtgagactcctccaagtggtcagaggtgtggttaagtgactgaagtagaatggaaaatttagttgcttagaacttggtatcaaaactgttcttcagtccgacttttattggtgctcaagtatatcaccactggtgttggcatcagtcttaggagtgggcctatccttgaagaatagcaagttaggaaaacatgactctccactacagttcatatgtgaacttgtaggtgaggtggtggataaaaaagagccaataatggaacaactttgggatcttaggaacagtataaagttttccttagagagttaaggatgtgatccagatgagcgtttgacttagtaaactaactaatgtagttgtgataaacaactatagttgggatcacaagaaagatagagactccaaaacaataaaggagtcacaagattatcctcatatagttgaggttggtgctcatgaatgtgagacgaggattataaccgtgggcggtcaaatatagaaaaggacacaagtccttggaatggtagccgaggctacctttgataaatgctagaacaacccaaggagttaggggtgcacttagaggatgagttggtattctcatcatatggacaagtagtcctaaggggcaaaagttggtcccagagaataaaattaagtgttagagtaacatttgcaaagatggtcttggtgagtaagacatgaatatatgaagttgtattctagtgagttggcacctcaaaagtaagacctcatggtcgtctgattagcaagtccaaaaaactagatgactcaagtagagtcaaggaataatcctaagggattgatggaagcatttagactaaggtgtattgtaccccacgaagtatggggaggatcttaagatccaagcatgagaacagtgggtatttcattgatggtagaatgcgccatgctaaagtcgtgggaaagagtttcccagaagaaaacaactttgacacaaagttgtgcataaactctatagtgcagtgctaatggataattggcataaaagacaaccatattgggctttggcaaagacctagacacaagtaagaagtgtcatagaggtaggctcgtagagccgatggtgtgaaaacaccgaatgtgccaaggcgtgttgccttgaggtcaagttagcgggttcatgagaaccccttccaaaggaatcccaatggaaatgggaatggaggaggaaataatagggaacaaaagtaatggaaacaaagttaaaagtagaaggacaaaaaggtacctaagtgagaggaatggatgaaacataaggaagtatgagacaaggggaagaagcctcaaagtcacacttggcaagattgcactgtaaccaatttataccaagaatgaaatcaaaagcttgactcggcaccacctgcaatgactgcaacgcaagcttaagattgcccacacgcacaaccaagtctacctcatcccgtgcacatgcatgtgtatagccgttgccataaagaatgaaaactagttccaccatacgacacaagtgtaaatggcaacgtgtggcaacaagtcaaacaatagaagataacctcaactaacacgaagagaataataagagacctcttgttataaaaacaagcttagaaagtaaatattgaatgaaccagtgccgaatgaaccccttgataataatcccaaaagaaagatagaggggtcattgacttattcgcacaaggtccctccattactcgtgcgactctttgtttcccggatgcatcttgatgtctaaaccatccactacaacaacaccaacgggaagttgctgacaccaaagtctccacccattccatggaggtccattccatattccaagcactccttagggacaatcaaaagtgcccctcacctccactaatgtgagtgcttggaatatggaaagggaatatagaaaatgcatatcaattagcccaaaaatcatagcttattgtaagctcataaatttagactttctggaggtcacccaacccaatactatttaaacccaaagacacttaaccctaaatatcccaagacccttaactgattggaaaagagggtgcattcttgttcatgggccctttccctctatatttaaaccccatggatcgtctttcaagtcgttccctttggttgcttacacttatatacaggagcaagtggtctaaattgaaatcaatctgacggctaccaaaatcccactacgctaatattagtatatggtatcgtagccatacacttggccctcacatggtgaaattattctttgaacaaatggttcaaatcccgaaaatgctagaggaaattatcttagaataagataatatattcaccaataaattgtagagaacttttttgaatgcaatatcgtgccaaactgaaattcaacactatctatcaccatgtataaaaaacattaatacaactgtaatgtcacatactaaaattcatattatagttttggcaaagaaactaaatacctctttactagattgaatgtaaataattataacgttttcaatttagtttaaaactaaaggtttttatattatgtaaaagacaatgaagccactataataccctaaatagaaattattttatagtcagataaactaaaggctattgcaattaattccaaggtaaattatcatctagttttaaatatattttactatatagtttctctataaattcatatgaataaagcaatgatgttaacaccaaagctagtgttatgtagaaaccacaacaatctacctttgtaatagagaataaaatgaacaaacattttttaacccatttgaatacattttgtgtttttttttattatagtagaatgaaaaataagagatgataactttagaaattccactaaataaatctagacactctacaaaagatgaggtgagtattttaatttccatttgagttatagtaatgtatataattgttctggtttctatgtagcaaattaaaattaaaaagttgaatataaattttctaaaagacattatagagctactcattaaaaataagattaccttttagaatatcaaagggtttttcaaatggatgacaagttttactagttatttaattgaagaagaactaaaacaaaagaagttttaaagtatattgttggacatattttaaaggttaggcactttgtgatgtttcagaagtacaaatgatgaattcttagaatgaaagtacattaactattcataaggtttacaaatctgataagatatatggaaacatataaaaattatacagttaaattaaatcataaatgcataaaaatatatgaaaaattatatgaatatttttctaaactcaatgaaaaatgtattttgaattttataattaaccatatctcaaacacacacacacatatgcacacacagacatatatatatatatatatatatatttcaaaaatatataaaatcctaaacattctaccatatgaaaaactacaaagtaacatctttattaaaaactatagaagacactagagtaaaaagtatttataacactaatacttaaactatatacattaacaaactattttgaacagatatataattttcttatattggaaatcctatttatctaactgagtgcttcatatagttaaattttgaaaaactacatcaatgggtttgttgtgcaaagctttgggtctgatacacgtctagatcagctcaagctttttagcaatcttaactgaaccgggcaatagtgattttcttcatcaatgcattcactcttgtgggttgctactccattctatcatctcaacaccacttctgtctcagagttaactgattctgcagctggtgtgtgggcttgtgctgctttagctgcccgagtatgtgttactgctgcctgagattttgcttccacgcagcagatcgtgcttgagcaatgctaaggaaatcataacctattttggtttctccccaagctcatacaatgcatagtataaaccaacaaaccacaaacttacaagcgagctgcatttccattgcacagaagactgcctcgcctgtctaatgatgctttatttaaatgcagtcttttgaagatagctggctgaatattgtgccatgtccgggattttataagattctcgactacattaaagaaggaacccaccggtcttcgtcactgaaagcagttggtttctgaaacatcctaccttcacaggattcaacccgcatgcttcttacgaaacttcgctcaatggtcaagcgataaggtcttgtgtcacacttcaaatgcaaatgtgtcatggtcgtgtacactgtgtcaccttcctccaaaattcaatctatgggcgaaatcgagagactggtagatcatgaagctaaagtctttccagaaactggtagatcatggagctaaagtcttttagcaaaatatgtaattgcgatgcgaacaaaactgcgctctaggttttcaaaagttgtgatggactttgcttgcaacccccccgctatataaatgcgccccgcctctccattcaatcaaacactgctcagctctatccatagttaaagtgctactgtttgcaatggcgtcccttcgtgctttcgctgctttcttcttgtgcatgctcgttgttgcaatggtggagcacgccaatgtggtggaagctca

SEQ ID NO: 14836 - DNA, 6307 bp, Selaginella moellendorffii
  Intron number 1 from transcript 125160 (locus 125160) deri ved from phytozome v7.0 (chr-ID scaffold_77; pos 455926 to 462232 reverse strand)
tccaaactgggcatatcgagcaagccaaggttgtattcaactccatgccacagcaagattctatttctttcaatgagattctagcctgtgaagacctacaaactgcctttgggatgttccacactatgtgcggtgagaaaactgtagtaacatggaatgccatgcttgctgcatatgcccaagctggggatatagctcttgcaaaagcgtttttcgataaaatgcctgagaaagacattgttacctggaacacgatgcttgctgcatatgcccaaaaccgccactaccttgaagcttttgctttatttgaggaagcgaaaatcttggacgtgaccgaccagacgtgttttgtatcagttcttattgcgtgcagtcgcttgggagatcttgaaaatggaaggaagaattttttcatgctggttgaaagctacggatttgtggctttgaagcagcactactcttgcatggtcgatttagtgggaagagcagcctcttatgaagctgcgagagatctaatcgagaacatgccattcgagccagattccttggagtggacatgtttactgggagcggctcctaaaactctaatcaaaggaaccaatgtgctcgctaggctggatggaaagagagctggagccctggcccttctagcaaattcactatcaagtagtcactaaaatcaaaggaaaaaacaagacttcttttctctaaagaaaaaagaaaatgcaccaaaaaggcatctgtttgggacaagacgacgttgatgtttatggagtaggacggaagagaaaacgcgctctgcttcctttttagactctaccaacaaaatcaaggaggataaaaagaagaaaaaagttacaggagggagagcaaatcaaaggaaacatgcaggcgggctcaagcaagagcttgacaccatcttacatgtgagtgtgtagaattttaaagcatttttactgggctgcaaaggacctccacaaggaagaaccagaccagaaatacaaaagagaaagtaaatacaaacagcttcaattccatctacctacaacagcagctgcctcttttcattcccttttatcttttttctctattttcttttctcccattttcgaaaatggcaacagctgcagatgcctcctctccatccccactggttccattgctcattcttgtgctggtgctgggaatcctgattatcccatggtatcttacattagagggagcagaggaggaagaggaggaggagaaatcatcagagatgtcactcaagccactctttttgctcccagttctcctgctcttcctcctccatttcctcagctcttcctcctcctctccctctccctctggctcaaagctcagcccatcaaatccagggatttcacagtcttcactcttggttggagggctcattgcactggtgctgtttctgctatggtgtcagttcacaatccagtctgcaattcagggatcatgaggggagcagggggaagctttgaaaggtcagagcatcagatctattttccagatcaagcaagtgatagaggagaaaggatttctatatagatctgtgggtggaaggaaaagcaggggaaagcaaagaaagaaatcaacacactcaatggccacaacataatttgggaatcagtaaatgagaggagagattcctgtgagcgcctgaggtggggaaagctacattttgcaagtggggacatggaccctgcccttcagtcagttgagtcagaagtttggggaagtgtcagtacattttccacctatgagcatcctaattcctctcaatatgacacacataatttctggaacttgtgtgaaggctttggagggtcaaccaaaatcaaggacttgtttttgtggtattctaaaaaactacttagagctttagattttacagtgtatgttttttcaacacccacctagactctaggggcataaaaccacttaattttcacctcttcactcactttctcacttgtgtaaatgaagctatcagcttgcaagaatgtttacaagcaaagaatagggagccttttccttgtgatgttcttgggagctagcagctgccagggcgctctcttcatccagctgaatgcggcaagcagcgagcaagctcctccaggcaacatcgcttgcaaggccaaacgatgccagcattccctttgcatctttcacctctccactcctggcaacgagatcaatcacactgctgtagtgttggggatctggaacaagaccaaagtcattagccatgctcgccaagcagctcaatccatcgctgagcaatcctgagtggccaaatccactgagcaagctcgtgaagctcgttccatcggcgctcaaaccttccagggtcatctcttggaggaggccagttgcctcgctgcaatacccattctgggcatagattccaagcatggcgttgcaggctaccaagtctctggctggcatctttgcaaagagtgtgttggcttcaccaatatgcccagcttgggcatgagccaaaaccaaagtcgtccaaagaaccatgtccagcatcgggatcttttcaaagacccgctttgccgatggaagatctccactcgatagtgatgttgtaagaaaattcgcccacgagagaaaatcacgacccggcatcgaatggaaaacttctcgtgctgtttccagctgcttcgtcaaaccactaacgaatcccaaggcattccaagccaccatgtttagctgcggcatctttccaaacacgagctttgtttggagagattcccctttgtgcgcatggcaagcaatgagaatggaccacgagacaacattgccacaaggaagagcatcaaagagcatcttagctttctccagattcccaagctgggaatatccggctagaatggcattcatcggcacaatgccgtacattggcatcttttcgtgcagcagaatctcggccttgtctagcaagccgcagtgcacaaagccgcacagcaaaatgttccacgaaaactgatccctcttccacatcttgtcaaaaaactctttcgctagaaccggttctttgttccgtatgtaggcactcaacaagactgtactcgagagggcatctttgtagaacattccgtggtacattttctcggcttctttgagatgtccatagcgggcatatgcctggaaaagcgacgtacaaaccacggcattgtgctggggcatccggtcgtacacgttttgggccaagcccatttgttctgcctcggtactggccatgaccagcgacgcccacgccacaatgtccagctgaggcatctcttcaaacaaaaacttcgtcacttccaagtttcccatttgcgagaacgaagaaatcatcgagttccacgcgacaggcccgcggcacggcataaaggaaaagattccttgcgcttcctcaagatgcccgtttgaggcatatgccgaaagcagcgcagtccaggaataaacgtcgtgagagactattttctgaaagatatccaaggctttggttaactgtccacaacgggaatatgtcgccaccataacagtgaacgccacattgtcccagaaaggcatcaaagcaaaacacacttcagtagttagcatatacccagctttggcatatgctgcaagcatggcaacccagcacagaacatctctaaaacacatcacatcaaaaataagttttgcttgttccacttgacacgtttgggcaaatacactcaagaggcttgtgcatgacaaaagatccaactgtggcattttctcaaacaagttcttagctctctccagatgcccagtttgggcatatgcttggcacaaactcttccatgagacgctgctcctctgcgccatccagcggaagagatcctcaccgtgttggaccaatccagcccgaacgtgcccacaaaccatcgtgttgagcgacacaacgtcgtgagaaggcattccatcgaaggctcttttcgcggaggagaagtcctggcggtggagataggcctgcgcgagtgtgttccacgaagacacgtcgcgctgggggctctcgtcaaacaccgcctttgcgagctccacctgaccatttcgggcatggcctgctatagcgatgttccacgataagacacgctgccttgacatacaagttaaatacaagaaagaagaaccattttttacaaggttgaatgtacagcttgttcatcgttgctagatgaatcaatgagaaataataatgtacctatctgcgggacaagaaaggaagaagttctcttagtttcgatcgatcgagtatgaagttttacctggaactgtacaaagatcaatgctccatggtcacgtccgccttgcagacggggcagagctttgaatagttgagcagccactcggagccgcaagcttcgtgaacgtcgtgcttgcaaggtaggcgggagagattgtccccgccaacgtattcgttctggcagatgacgcaagagctggatagaaaagccacaaagaaagcccaagtcagaggagggagagtgatcagagggacttactcggcggagccgccgccgccgccatctgagaagatggtccggtcaagggaagccactagagctggagaagccacgcacttcacgctctcgagttctacgaggctctgtggaagacgagtgagtctcaggctcgagaaaactacgcgaaaagaaagaagggaagttacttgcctcatacgacatatccagtgaagaaaccgcagtagcctccgcgtgagcgtaagtcggttcatcactcaaggagagagacaaggctgcacttcaaaccgtgagaagttctctcgagaaaaggaaaaaagatgaaggaagacaaaccaacaaggagaagcgtgagaagttttctcaaaacaaatagaagaaccgtgagaagggaaaacataatagatgaaggaaggcaaaccactttgatcaatggaagcaaagaaggcactcaaacaaagaaaagaaaaaaaccaaacaagcaaagaagagggaaagaagtaccttgcgagttgcgacaacttacctagagcaatatcgagctcgtgagatccgccgtatcgcaagcgcagcgcctccatctcgagctcatccctcgccagttggagctcatcctgtagcagctctcgccgcgagggacgcctgctacgccgcctcggcgccggcgctaggatcaagtccgtagctccatcctcgtccttgtcttcgtcgaattgcccccatcgctgctgttctatccgccgctgctccgcggcagctctgcgccgacgacctggacacgcccctggttcctacattaggcttcttggaagagatttccatacctttgccgatcgatctctcattccgggtagaatcttgcgcggctgtcaagaacagggtgagtcgagcacgaaatctcgcgaaatcggattaccgaccagatcgattcatggcggcgtggactggaatcgattcccctggagattgatcgagcgccaagatggattgaatcgtaccttccaagaagcgcgctggggtgtgcgcgtggacaagagccctcgagacacacgggcttcctcctcctcatatattaaaaaaggatccgaagatccaggcatcgttttaaagggattccaggttaggttaacgctaacccgggtgagttcgttcaaacttttagggcagaagcaatgcgcgggaaaggcggagctgttcttctagcgctcagcgtttgctcctttggcgccatcgtctacttcgcgttcttggcgcagctcttgccatcgtcggggccaaagcctctggatttcatccggggagagtggtaagtccttcgcttcatcgtttcttgacgagatctggggtttcttgatgatcccaggtactatttcttcctggttcccatgacgatcccggtcttgatcgtggctgtctacttccactggctcagcatgaagctcttcaagcacgcgtgagagcttggctcgatggatgcaatccagatcacgggcgctgctgataaattccacagggtcgaggatttcgcggaagtgatccgtggctgcgcgtttgatcgagatctcttgtccggcaggcaaattcacgattgggtgtcgcagagccagctccgatctgacaggttcctcctcaaccttctcatcgacatgtatggcaagtgcggctgtgtggaatccgcgcgctcgatcttcgacaagatggagccgccaaacgcattctcctggagcaccatgatctcggcctatgcccagaacggtcatttcgacgcagcgaagagcctctttgac

SEQ ID NO: 14837 - DNA, 3825 bp, Selaginella moellendorffii
  Intron number 1 from transcript 35272 (locus 35272) derive d from phytozome v7.0 (chr-ID scaffold_30; pos 121020 to 1 24844)
ccagtttggctactgcggatcgacatcggagtactgtggcgcgggctgccagcgcggctatgggagatgcaactaaatattccatctaatgtgctagacacctccagcatgaaagttgcgagtaatatctaaataagcactggtgtcctctattctctttttatatatatggtgtgatgtttgctatgttaccaagctgaacgcattaaaaatctcatccaatgcagtctccttcatcaatgacgcccaatgcactgcaggttagtgtggtggattccttctactgcatggaatagcttttttagatgccacacttgatctttcttttacaccaaggattggacgcatggtggattggatcagcccgttgtaagtctgctctggaatgagagagtgactgtagtaaaactcaacattgcatcgcatgtcatgagcaggatcagtccaggcattcccaagctgcagtatacaaggttactttcttgctcttttatgttgtctataccctttctggtccatgggcaatgtggtccaaaattttcacagccagagatagtgacctgcttactgctacagtttgctaaattgtgcccatgtttgtccttgaaacaccagaaatgtaaacttttttattaagtataaatagaagtgaattagagaaacttttagtgcaaaatcacaactattaaattaaagaatattctaaaatatactttaacattctaaatagattctttacaagttttcaaaactacattcacccaacatcttcttgagtgctaccaagttggactgtgcaacttgagggctggaacttctcaatggaatacacattgcacagctttggttttgggctttgtttagttggtgctagctgataatgaaggagggggttgcaagccgataaagttgcaatttgtcaagactgttgcaaacccagcaacttagaggcattggccaagcctcaattagatgtgtcccccacttggaaatttctccccttgaaaaccccaattccaatagcataactggtggggtgcatggaacacctttcatgcatggaactccccccgcggtcttgcatataatttttcccccactcaattaaattctttttattttataagtaattgaaaatcttccccccaaggggacacatggaaccctgcccttaggcaacacaaattagtcttgctgcccataaaggcaattccacacctgtataacaagggaatttccctctcatcaacaagactctccatctcttaagattcaatttgcacaggatattacaaacctacaacattgttgaaacacttaggtgaggctcagcctaacctcaaaaattcaaattacaaagcttaaatacaagaaaacttttagttgaattattaggcttaactaattaggcttttagctgaattctaaactatccatcataacataggctgtatgcaccacttgttatctccagaaaatcccccgctacctctatccggccttaaccttggccgcagcatcacccaggaagcagctcctgggtgttgcttcaccatgccaggatgttgatcatgcagctgtagtaattgtagcccggggagttgattgccccggcaaaatagccgcccgcaatcgacgtgaagttgcagcatatagcacgcgaatcaccgccatggcttagtgcaataccaaggaaagaatatctaaaaggattagccaataggtaactttcgatactcataatcatattcacaacaatatcaaaagcaattaaaattatcaataatcaataccatcaaatcaaattgaacaatagttacctcaaattgccactcaactcatttgaacattaatatagttgtaaactagcaaaatgcacaaatgttaacaacacaaatatatagccaaatcatcaatattatttttattaatattagcaaaactaaatgtcaatatctaaagaaagctcaattaatcaccaactatctaaataatcacagatggaaaatttaactttcttaatatacccatagaaaaacatttcatctcactttaatattaactttaataatatcaatatcaagatattactttaatatcatcaacaataaaacaaagttaaaagaaaataagagtgaatcactactcaacaccaagctaaccaaagttgaaagtactatattagtatctgaaaccaatctttcaataatatctagctacacattaataaagagtgaatattcatgtccacaactcaatgtaatccaataccatagattaaatacaacgatataatgaagatggaactaacatgtcaatatgaaaaaactatatgaatataacaagatgatcatttgcaatgccatatgacaaacaaactcatcactgctaaataataatttacctaagcataatgcttagttacaaagcaactaactatcatttttcaacctgccttcatataatttagcatcaaactcatgcaataaaaagcaacaatgtaggtaacaatatatagaatatggataagtatgaataaaacaactactcaaatctaatcttacaataataaacccatctatataactcttgttattatatatggataaatcctctgaaacattagataagtcagagaaaacggaaagcaaagcaagaattacctaagactggcctcggttcttgagtatgaataggctcctcaacattgatgctcctccttgtcgcatgtggtgtccatttgatccgtcaacctctggagcacggctccacggcaaccgacctgtccaactatgctctctcatcggttctcctcgacttctcttccgcctcagccttcatctttcaacactcctcatctagcctccaaagctttgcatctgatacatgtctagatcagctcgagccttttaacaatctcaacagagcctcgaaggctggcaagaagatattgttggtgattttttttcatcaaagcgttccctcctgtgggttgctgctcccttctatcatctcaacaccacttctgtctcagagttgactgattgcgcagctggtgtgtgggcttgcgctgctttagctgcccgagtagctgttactgctgcttgagattttgcttcaaccacaaacttacaagcgagctgcatttccattgcacagaagactgcctcgcaccctgtctaatgatgctttatttatgcagtcttttgaagatagctggctgaatattgtgccatgtccctacattaggaaggagcatggtcttcgtggtttccaaaacaatctgagcttgagtttactgatttggttgatgtaacctaccttgttcttacggagcttcgctcaatggtcaagcgatgaggtcttgtgtcacacttcaaatgcaaacagacctgatagcgcgccttcctccagattttcgtcttgtggtgcaaaaaattcaatagggtttgtcgccctagagagagtggtagatcatggaactaaagtctttccagaaacttgtagatcatggagctaaagtcttttcacgtgattatagcaactatgtaattgcaatgcgaacaaaactgtggtctaggtttccaaaagttgtgatgtaacccaaggacttcgcttgcaagccccccgctatataaatgcgccccgcctctccattcaatcaaacactgctcagctctatccatagttaaagtgctactgtttgcaatggcgtcccttcgtgctttcgctgctttgttcttgtgcatgttcgttgttgcaatggtggagcatgccaatgtggtggaagctcaggcagcgtgtgcaacccgtccctgttgcggt

SEQ ID NO: 14838 - DNA, 5242 bp, Selaginella moellendorffii
  Intron number 1 from transcript 108612 (locus 108612) deri ved from phytozome v7.0 (chr-ID scaffold_37; pos 1361268 t o 1366509)
agaagacgatccagtacttgatcggttctggagtaaagagccagagtttcttctttctcgggaactcaaaagttcgggttttccatccttgcagggccgagaacaatccatacctcgggttcatctacacgtccttccaggagcaagcgaccgccatctctcacggcaacactgctcgccacgccaaggagcacggagaccacaacctcgcgactgtttgcggcctcatcgcagccgacgagaagcggcacgagaatgcttacaccaggatcgtggggaagctgtttgagatcgatccggagggcacaatgctggggctggaggacatgatgaggaagaagatctccatgccggctcatctcatggggagaaatgcataatacagcaccctcctctctttggttgcccctttgccatgctcactcctcacttcctcccctctcttcactcctcacttcccccgtggcgcgtttagtcacgcccaccttaaatgtttaacgactaactctaaattagtaacgttaaactttaattagtagatgttgttaacggatatgttaatgactataattttataattagatagctaatgaacggctgtaatttataagtatataacctatgattggtttaggtttttcctccttatgattttcttccacaagagagaaaatatgaaagatgccatcgactaatgagatgtcaatctgataatcaaggttgtaaagatggtttaaagttctcacatttgctcaaatgcttatgagctcattatacatcattatcaaatgtactcattatatagtcaaccactcccagaattttgttgatcacatgactgatccatgtaagcaatgaggtggcatacaaatccaaataagcaaatagagcccaccctaaataaaggggggttgctgtattgtgcatactacccatctcatgtacaatggttatgacaagaacctgtttgagcacttctctttggtggcacagaggacaggggtgtacactgccaaggattacgcaggaattctagagcacttggtcaagagatggaacgtcaagtccatcactggattgtctactcgtgcgcaaaaaggcccaggatttcgtgtgtggtctccctccttggatcttgagactggaggagcgagctcagagcagggtgaagaagggccccaagactagaacgtttagctggattttcaatacggaagtcgttctctaggtgtaaaaggtataaggtgtacattacgagttaatgttctaataatttgctttgttttattttgtttagacacaaataaaataaaagaagtttataaaaagcatgtgcattgttttatacattcttgtcttttgattgtttcagtggatatacatagaatatatttgtatcaaattggtgagtatcaaaatcccaatattagtatatggcataactagacctcaagtgatgatcacttgctcctatatataaattaagacttttggattaacatttctgtattccaattttgtatttcatgcactcaccacagttaatattcatttaaattttctgaataaaatacattctaacttattctaccatctaatggtttgtgatatttatataatttataaaatttgtgagtaagttagtcacttttcttattatggtttctccagcattagtctttcagaatagtggaggggtgatgtcccaatgtaatctcttgtactgatatcattgttcatatgaacaaagcgagaaataatctataattgataggaaagaagaggttaagaaaatggaagaataccacagataaatgagttaagtataccttgaaactcttttacttattattgagattcaatagcaacatttggtggtaacaccataacttagccaggtcaatgatcaaggaaacacattggtaagtttgatgagtgtgatgaaaattgtgtcatattttttcttttggccataatttttgagtttagatccatgataatatagatcactagcatgataatcaaaatggctcaagaatccaaaccaaagttatagtttgtccttgtttttttagcaagatttaatttgattgagatggcaaagaaaaagagtttattgatcacaaattaatgtcaacaataatgccttataagtggtttgtgaaggatttcacaacaaaaatgtattgtttctacttgttagcaactgtttataattgtaatatattttaactctctctctctctctccttaatccaaggggaaaagtgatagtatatttaaatttcatcccatgatacattttaaaatactaatcaacaacttttattaagcctaagaaccttttgtatttttatataaggaaccagtcttccttagagatattgatatcttcattgacttggaaatgaaaatgttagttccttttagtttaataagatttcttagtcaatgaaccctttagctcaataagggttattatggatgctttacaaggaaaaaaatgtatttatgaatacttaatgcttgtgtcatttgcctgaataccatataatgcatttgatttctctccctttaacccaattgtaaaaggggcaattattttataagaaattttttaatgaatattttatttctattttccctctatggttttaacaatccatagtgatagtatatgtaaatatcatgccataattatatacaactttgtgagtttgtgaaaatattttgatattttaaatattctttatggagatctaagattttgttaagctattaacatatcataccacatagtacctctatatcattccactcacaaaactttttcatccctcttatttttcaaaattgctattgtttcttgtcatacccactacaaactcaatataagttgtactttgaaatattgctcatggcttagattcttagtcttgatcaggaaatatagaaaaaataaaacttctattctctatacaaggaattataagaaaaaccagttgatatggattgcattataagtgatttccatgtataataattctatacatgtataaaatgtcaaattagtatcttatatttaataaaccttatctggaggggctaatgttttaaagatagcttttctatctattgtgataatatgctgaaaaaagaaaattctacttcactttatttttgttttaaaatgaaaactagaattgagaaaatgagccaatattaaaataaaattaagtccacatgaaatttatgctttatttattttaaattagaaaatagctaaataacacttgtttaaagaagtttttttcagtgttgaaattaaagtgacctcgagctagcttcataaagatgatttaggtctagtcataaataattgattgacctttatttgtcttagccacttttaccaagaattcaaagaactctttgctgatttatatgattattaataaaatgttactggcagataatcatctagttaaagtcaaataatttatcaaaataatggctcatataattttttaactatttaaacataaaaatctcataaattaagagtcattgcatataatagcccttcaaattatattaaatttagatcatctaaattgtaacacaaaaccagtaaaaatagtatacacaaaaatatatcattaaaaaatcattaaaaagtatatctctaattatgcgagcacaaattattctcgtttttaactgctgtctaggtatattctaatccggccgaatgaaatattcgcagtccgtggagtatataaatgcaagacctgcggcgatagggcttttctttgggggcctctggcggttgagctcgggaggattgcttgcctgtgtgcccgcttcttccttctaacgatttctctcgcttgtgtcgtagatggagctggatctggatggcgcccatggtgagtgatcgcatctctcctttgcttgcttgattgttttgctgtggagcttggtttttcttgcttgggtgctttctttctcctctttgccgcaagaaggcgaagagctcgactagatttcccacgcgtccatggcccgacctggggacatcctggctcgggcgttttcctttggaggcggcgcctccaaatgggactcgtgggtaatttgcaagaggaggctgccgcgctggtggaggtactcggcgagcgcctctaccaggctaccgtggcggcctccacaaatgtccaaaaatctaaagaagcctgctcttttgttgttcttacaaggtctctcttctccaagtccaagaaaatggatctctactccacgatgaagtgctggggattcaagccaaatgccttgaaggcttgtgccgctctggcagctctctctcgaggatggattgcttggatcgggccaacggcagtgtattggaccaaacctcttcgtctcgtagaaatgtcccaagtgtgagaactccgaggttgtgtttgatactggtccatagtgacgtggaattctttgacagtggtgatggggagcggctctcgaggctttgtgagaactttcaccgccgcttgcacgcgagaagatgaaactgaaatcgagggggtctcagcatgaaaacttaataatttattaaataattaggtttaataatactaattgaaaacctcgtatattaaagaataatgtttttctcaaaccctagctatgcgctggtgctggatctagacgacacgctggaatgcagaaagaactcaactatgcctagtagcgttcctcagcaagatggcgcaggtatacaagctcataatcttcagtgtgtcagactcgtaggactgtctcccggagctatcctcggagagcttctacgatgaggtccgtgagctgagggagcgagccgagagcttgcccaacgactacttcttctgcctcgtcgggaacatgatcaccgaggaagcgctgccaacttacttgacgatgctcaacactctcgatggcacccgcgacgagatcagtgcgagcccaagtccatgggcactgtagtggcgtgcctggactgccgaggagaattgccatggtgatttgctcaacaagtatctctacctcactggacgagtcgacttgaagcaaatcgagaagacgatccagtacttatcggtcctggaatggtaaagagccagagtttcttctttctcgggaactcaaaagttcggtttccatccttgcaggatccccagaccgagaacaatccatatctcgggtt

SEQ ID NO: 14839 - DNA, 3992 bp, Selaginella moellendorffii
  Intron number 2 from transcript 7582 (locus 7582) derived from phytozome v7.0 (chr-ID scaffold_185; pos 34971 to 389 62 reverse strand)
gcgtcctttcgtggaggtcatcagtgttaggtttgcttgaccctgacttcaagacaaaagcaatcaatcttcttgacaggtacaaagatatttttgcttgatcaaatatagatttgcgaggaattcctcctgagatctacatgcaccgaatcgctacctcaaattataccaagaaagcaagtagcctatcgaataaaccctaacatgcaaacgaaagttaaagaagaacttgacaagcttgagaatgctggcttcatctacctaattcaaaacctgaaatggctatcaccacttgtcattattctcaagaaaaatggcaaactcaaagtctacgtcaactacaaaaggctcaataatgcaacccaaaaaaacaccttcccaattctactggctactacagagacttgaactcaacactgtagagcaaagggcaaaaccctaactctagcatttgcggctatatctccaagcaccgagatcaggatctacaacaccgaaatcaagctataggcctctatgagttctcccgcatcatagagaaagagtacaagattgacattgcaaagaaaatgcttccagcttttcgagaagaaatggtgtgtgcccaagaactcaaatatattttcaccacgggctacattgcaggggtagtcaagcttccaaacaacagaaagcaagtcacatccatgttgcaaacaaaagggatgccaccgggatgcatcaagatcattgagaattacaactccagaagctcacttcaaatgagtaacatcaccgatgaagcaaagccaaggctcaagtttctcatctcaactctcgagatgtgcaagtcaagtagctccaccagcaaagccattgcaatcctctatgacttgcaacacaaaatcaaagtggacatcacaagttacctccacaaaaaactcattaaggaaatccacttggcaacaaaactgatccatagcagccaaaaatgtgaaacacttgcattcccctatgtggctgcacttgtgtcagctcttgactcggaattttcactcagcgtgaaagtacctccgacaacaccacaaactagaagaaagtgggaatgcaaatcgaagagaagagaggatccgctccatatatccgatgaaggagatgaagaggaggaagaacaagaggacaaaaaagagcttttgccactgacaatgactccaccagaaaaaagaaccaagatgacaacaggttcacccccaaagaacaggacaaccacaaaccaaatcgaaagcatcatctccaaggaagaattggaggaaaagagtcaggaacaaaaccaagaaatcaatcttgactccataaccaccccaaccaatagtgtagcagttcacaccaagaaagaagggcgagcatccccacctacaaaagcaccagttgacgacagcactatgcctcagcaccgagagcaccacagcaaggagcgtccagaccaggaatgatgcagggagccaaagcaagagcaacaatgcgaactagagctgccacacaggctgctcagctcggtgttccttcagtttgttgatgaagtccaacgcctccaaccaacgccacagatgccaatcctgccggactttgcatgacagttccacaacgaataaatgagcatctttctacacaatggagtataggccataatcaacgtagttgtcttccagcccctagatgcaaagctcaacaagatccagaacgacatccagcagctcaaaaggagcatttgaggtatgtccttccaagggacagtatgtgcggagacacaatgcatcaatgatgagctcgctaaagaaaatgcagacctccacaatgagatccccattttgatggcaaagcagcctgcagtaatggaagacgacaatgaaagcaaacacgacgaggagaatgacgatgatgaagagttccattagcgactcaacaaattccaagtcaaactcgcaggaaattcagtgccaacaaagccaaccgatgcaatggagtagtaggggcttcaagacgaagctctgtttagttgtgggagagtgaagtatatcaaattaagcatgcatttgagcatttttttgacattcaagattacgaccttaacactcaaggttacaatcttgatagtcaggactcaggaagaaatggtaattgccaccatgtaggagtagttaagggggagagttaatactcgacccctatccctatctttgttgtattccaacctatcaccaatgcacatttatttgctcaagactcagagtattctagtgatgtcaagcttatccttactcacgaccactcgcatgatccttcttggggattgaaggtctcaagttagtttttaattaactcatgtgtttggtagcttgttccaaggggaatgacaacgaaagccctttgtcattctgcaaccataacagtagtctggtgcagctagtcgcaatcccaagccaaaccacaccaaagattttctcctagttttcaaacatcattaatagcatataaaagaccattatcaaagagcataaagtttgtgctcttgaatagttgcctatgaatcttctgacaaaagcattccaagagtttttattagaggctttctttggccaactgtgaaggcaatgtatccaccccttatgcactaatgtgtgactttcaagtactctaggcttatcatagatgcttgacataaattttattaaatagtgagttctgcttctatgcttctgacactaggccttcacaatgatattcaggagactcttctagttttctctccatccatttccaacaagtttggacatgctgcatgagagttttgagcttgcaaaacttaggatcctgcaaggtggcattttcaagattccagcatgtttttcctactttgacttggagcagtgactcttttcaaccacactcagctctggaccatggccatccacacctgtagcagtcaatcagagcacctcattcttttaacaacttcacagcaatgaaagtggtggacgtgagcactctacagctttttcacaactttagtaccttttcagcaggactcttggatataagagatttttctggcactcttggacacagcatgatagggggagcatggcttcctcaactttgagctttccacttgccttctggtgcaattttcagttgtgacaccactttgtacgacctagacttctataggcaatccaggatgaccatagcttgtcatcagcaccttcctctatcattcatgactactcaattgcaacataatggcttttgggacagtggtgcatgttctaggctttgacatccacaacaacttggctgtccaccctgctaaatgatgtcccgcaatttacctagctccaccttcacgtatagctgcaccattggcaaatcctttgtatccattccaaagctcacttattgaatcccattttaaagaagagttgtagaataaaacaaaaacctaaatggtatttggaagacatttgaagtttctgttaaagtgaaagagtgtatgttagacagtgttagtttttttcatcccaatttaatctggacaaaataaaccatcaatcaatgtgcttgaaagcactaaaccaagatgtcctgcatatacttgaagctaagcccaggcctccttttgtttcttgcaaaaaactccaataaacatcagcatcctggagtgacacaaacacaatgctctgctgcttccctacaagccacctcagcacattgtaatgccccctaaaaccatctttttaggacatgccttcattgggcatttgctgcaaacatgacatccatgtaaagaactttcctttagctagtagctgatccaggatccatcaagcttgaagaacttcgagttggaatgatggatatggattgctgctgaaaggcacgctgtgtcttccaagccaccatcgttgggaacttggatcactttcatgaccttccaatcctccttgactgcccag

SEQ ID NO: 14840 - DNA, 12357 bp, Selaginella moellendorffii
  Intron number 9 from transcript 406159 (locus 406159) deri ved from phytozome v7.0 (chr-ID scaffold_5; pos 345320 to 357676 reverse strand)
atcttggatcgcacactaatgttagtagccatagacatagtacaaggttcccaagggagagacaataccacacacttcacctcatttgtcctccgtgaacaagatgattggtttggtactcaagtggtcaaccaagttggaagattcaaggtacttttaaaaaatgtgaagaactttgcaaattaacactttccgaaaccccaaggactcattcttaaagaagctttttttaaattttcctttaggatatgtttcttttggtttggctcatttattaaatatagaccccaaccttgttgtgttccccttttgcaggttatcattgaatacaacttgataattacatttaacatttccttgtagttggttgggttccaatgcatcaccccaccttaagcccaggtttgcaagcctaatatgaaggcatggaatgcatccatgtccgtgacaaagatcctcttcgccataaatgcattcatatattcttgaatggttcccatttgcttcagcctatttagctcatcccttaagtgcaaagtagtattcggcaaaacataggttgcacaaatccttgcttttataatttcccaagcgactactagtccttcgttggcttttgttgttttccaccaaaacttaacattatctcttaagtatggttttgcacataggactttctttaagtttagtaaccacaacactcggaaataatccttcatatcataaaatcaatcctccactaccttatagtcattcattcccttgaagaatggtgggggctttggtttgtacatgagaactatttgggggattgattccacttcaatttgttcaaccttatttggttcttcctcagtccccatcaaagggtctatgccttctacactaccagcctctatagtcttttgccttttctttcgctttttgtcatgctttagtttgtgtatgaaggtctatagtagggtattggtctgtgccaattgtccttctagaacgtctaattaagccttgaatgatcgaacttctccactagactcatgtttggaagattccttacttaagtcttcattgtgcaaggattccttatctatagcttcttgttcgattggaggctctagctccggaggaagttccgtctttgccttagttcttttatgccttgctttagccatctctcaacaatccatctttatacttcactagaactgaggaaaaagcttcgataccaaattgtaagccatgaatttttcctttccaatttactatattagctcgtttatccaaccactatagccttggccttagttaagttctctcaccaaaatttctatctactatactagctcttacttggttctacttagtttcaactatttactgcatgagcaacaaagcattacctatctgtccacggattcccacactctctctcaattagatttaaggtttagctatagtccccacaggcatgagcagtcaagcacaccaaacctccaggttcctaacatcccttggtataacaagagttgatataggaccctttaaatcccaaaccttggatgaaaaacttgcttcaagaaattggggggaaacactgtggcctaacagcccagtatgggtacccctactccctcaattccatcccgcaagaaaggcctaagcccctaaaaagggcaaggatcaatgagccgcaaggtacttaagtggggcaccactttacataagctaggagcaccatagtcggtttcccttctgggagtgggaattgctcttgagtactttcttgggtggccccttcggcaccacttgagtctatgttcactcccacccaaggcccttaagccccaactttaacctcaagttagtttggaaacattactggagagtaccttcaagattgcttcttggaccacactatctctattgtacttttggaaccctctatagcccccttaggagacacgtgcttttgtctttcacctcatgacctgtattagttttaaactcggtctcggactcaatcttggacttgacctcagattcggtctcagactcgatttcggacttaatctcagactcatctcagacctgaccttggactctatcttggacttgatcttggactcagtcttggacccgatcttggatctcagactcgatctcaaactcggtttcggacttggtgtcaaacttggtctcggatttggtttcggacttgatctcagactcggtctcaaaatcaatctcaaagtcagtctcagactcgatctcatcagatgaactctttgttattttggttgtgcttttggccaataacacctcagggagttggttccttacaagaaaacatagaccctttggtagggattgagtcaaaaccgaacaaggtcgaataaactaaagtagaatcagtttcttaagcagttcccaagtacaaaccaaagcccccaccagtcttcaagggagtgaaaaactctaagatggtggaggattagttttacaatatagaagcattgcagttatcaagcttggaaaaggtcccatatgcaaaactatatttagtaaataatgctaagtctttgtggagaataacaaaggccaatgaaggactaatggtcacttggaatgatgaaggcaaggaacaatacaacttatgttcttccaaatactactcttgaatgggtttatagccaaaaggatacttgtcacagatatgggtgacatggatgtgttccatgccttcaggtttataggcttgggcttgaggtgaggtgatgcattgaaatttaactaactataaggaagcattagatgtagctattaaagtgtatttcaatgataacatgcaaaaagggaacacaatatatttggggtttacattgagcaaaggagccaaactaaagggggtatatggcaaaaggaaattcaaaataagtttctctagattttgggaaggtagatccagtggctaaagagcaagtacgtggggaagtcaagtaaaaagggataaacccattgataagaaaataaaatttgctagcaacatgggaaagaatatacatttcaattgtggtgaagcaagacactttttgagagaatgtctttacccgaaaaagtccagagtcaatatagccatcaagttgggtgaagtccaaattgagatatataattcaatccttaactcaaaattactcattacacaagcaattttggtagagagtcatttgcgacatctactagccctccaagggaagctcaaaggtaactttgttaagtttcttattaatatgggtgctttagataattttatggctgcaaacataatctagcaagccagactaatggtgtagtggctgggtgaaccaaagactataaagtttatttaaggtagctaagcaccaatgaagtacttcaacaagcaagagtcaaaatagagacatggaaagtggatatggattttactatgttagatatggtgagatttgatgtgatcttcaagatggattagttcaattaatttgtggtagccttgcatggataaggtaaaaaccttatggcactagcgaatgcctgaggagaacaatccaaggtctaaaggtagggtaatgtaaagctaaagactcctgcttgaacctaatgttcatgaaaggacaattcactaaaggaaccaaggtagtatttttgtgtgcttactcttaatggggagtgacaagaaaataggaatagatgatatacctttaatgatacaataggtattaaactaatttcgtgatactatgccggaggagttaccgacagagttatcctccacatgactaatagaacataaaattgagttaatcgagggtgataaggtagtggtttgtcccccctatcagttgaatgaaaaggaacttaaggagctcaagtgccaacttaagaagttggtggataaaaggtatgttaggttgagcaagtcgttgtatggggtgtcggtgttatttgtgaaaaagaaaaatgcctctatacacatgtggatagactattcgttgctcaacaagtatacaaagaagaacaaataccttttaccaaagattaaggacatatttgatatgttgggaaaggctaaatactaaaaatgggatacaagaaagattgacacatggaaagtgttgtaacacattaaagtgttaggaacaagtctgagatgggacctgagaaggagtccgaggtggagtccgagatagacctaagatggacccaagatggagtctgagatggagtctgatatggatctgagatggactcgagatggagtctgagatagagttgagatggagtctaagatggacctaagatagagtctaaggtcgagtccgagatctagttcgagatctagtccgagatcgagaccgagactaagactgagaccaagattgaaaccaagagtgcgaccaagaccgagcctaagactgtgtctgagtccgagtctgagtttgattctgagtttgattccaagtccgagtctgattccgagtccgagtccgagtccgagtccatgtccgagtctgagtccgagggcgaaagcccaaaacattcatctcccagacaatagggggtttggtgagctccaaaagtatagtaaagggaagactccaatagagccaatttggccaagaaaggctaatgtgaccaaggaaggttatacctacatagtagatgataatataaccattaagaagtccaaaactagaatgaatataaacaaacaagtgaagtaacttggtgaagtatttaagagttggctctagctcccttgggagattgaatggctaatgctcccaatccaagtgtgggtggaaccacttacttggatacttggtgtggtttattaaaaccttactctagctatatggctagggcacctaagagcagaaggtggagagagtacccacaaggcttgtgtaaggccacaatgtttcaaaatgacatggaaaaccaggatttaaagaaatttcctcatcactcaatataataattttatctccactagcataaatgttagcaaagttaatgccttaactacatatcctctccatccaacaatttactccaagtgctaatagatcaattgacaagctttagcaaataaacactataactcttttctaactcctcaatgggcaaacccttaaagaaacaaggtaccaacttaagtttagcataatagatcaccattaagaatttagtcaaagctattataatgctattacatgtaaataaactaatttcaccatcaattattttggggttaatcattgtaaccaaacaactttgtaaagacattacttattatcatatggatatgatataaaatcacaatgacttgatcatcaattgagcaacaccatgggcaatacctatgtcattacttcaaaagtttatgtgagtatcaaatgtcaactcaattcaataaaatataatataaataccacaccccactgatagagatttataacacccaacgccattaacttttgtttacaatatagacaagctcatgccactctttatttgacaaaactcaaaactaatccaacaccaagttactcaaggagcaatagtgaggttcctcagaaagaattgagcattataaccttaatttccaatagcaaacttaaacaaaatggtttagcgcttcaccgctatctatcccataactcaacatttgtaagaccattattttcaacatgcattaaggtggggactcttaattgcatgatgtgaacacaagcaatgagtcacactgtaagcaactaatttttctattctacttagtcacttaaccacacctctgaccacttgaaggagtctcactcacaacctccatatgtcctattttggacttgggcttgctagcctcaagaatggcatccatgccacttaacctttgcacttagtccaagtgctccacgtgtccgatcccatgaccgacaccccaaggtaccaccgacatattggcccgttacgctaaggctatgcccattcaccttggtcacatcggtggtctgacaccacctacataccagtcccgtctctcaaagactgggccatccatccatgagtgatcatcccagatccactccttagcatttttaggatgcccatagacatggggaatagccttccccaatatcccctttccggtcctcaccaaatccctttttgcccatggccgtgttcgccaatactgccactagaccaagtcccacaggcccaaccactaagtcccacggtcctttgggacttcctcctcatatgaccgtatccttggtctctacactataagatggctccttttccttttcacagtctgggaccttggggcaacattttggaacaccgtggccttatgcaagcctcgtgggtactctccccgccttccgcctttgggtgctctagccgtgggcttagagcgaggttccgttgagccacacccggtatccaagtaggtagtgccacccacacttagactgggagcatcggccagtcgatctcccggaggaactagagccagctcttgaacacttcaccaagctaccccgcttgtcagtccgtgttcactctagtcttggacttcccagtgggcagctcatcacccaacactaggtacagccttccagggccaaactggcctttcttggccaaactggctccactgcagtcctcccccttactatacttttggagctcaccaaaccccccagggtctgggaggaatgctttgggctttcaccctctcagactcgaactcggactcggactcggactcagattcagacttggactcggactcggactcgggctcaggcttggtcttggcctcggcctcggtcttggtctcgatcccgatctcggtctcggtctcgatctcagtcccggtctcggtcccggtctcggtctttgtcctggtctcggtctcgacctcagactccatctcgggtccatctcggactccatctagaactcagtctcggtccatctcggactccatctcggtccatctcagactccatctcggactccatctcgggtccatctcggacacttccacgtatcatatgttggtccttttgggtccctttttagagcctcgcttattgctcgcttcgtgctcattcctcgagcactttgttgggagttccactcttgctcttgacctttccagttggagcttttagtccaaacgcgttatgctcgtttggctttcgcttcggccagtaccacgtggcacccttctggcttcactttggggcctagggattttgtgtctcacaactccatcacccataaacaaagttcgatgtcctcatcgaacagtaaacccccttttataaagtaacacttgcatgtattaccatttccatccttggcacctagccaaaatttgtttatggtttgacattgaaggctcaccatgccttgtccatcctctaaggagtatagtttctccaacttagagacttattcgaccacttgtggtggttttctccgtttattgatttagtcctcgttaaacccgttagaggcacgtcctctatctcaatctcactactccttctcgagtagtctcagtttccaccgattgaacgtttgcactttggaaattttactttttgacttcttgaagtcaatttcctagatgtctctaacaccttactttgcatatattgtgcaactccacttccccatcctaggaagttctctacttgagggcaccatcatcttctcttctattttgtgccattttgggcactaagttctagttatcatactttgtgctagggttgtccatggccctattatttggctaccttactactccctcccttggagcttccacttttgccaaattggagcaattaggaatccatccttagaaacacattgtctttcccacaattcgttagcacccaacacattagtgttcctggcctaactttgctttttggattctttcctatgattcccatggctcttttcttagccactagtcttttgctcttatctttgattgctacacctagtaacatcggatcactacctaggtatcccttcggttctatagcaaagattttgctttgccaagtccaaagggtgttcacccctagtatgtctctttaggattttctactatggtttctatccttggcccaactttgtgaccctcccatgggtcttttatagagactactttcttcaaactcactataccatcgcatagtcataaatcatttcccttaggtgttcttcccacttggtcaccttgaccaagccacaccatcatcaatagtttaaaccaacactttgaactaagaactttatcctttaacctcacaaagactttgtccttgtttttagccataagatcacctagtgatcacattttggcaccttaataggtttaccaataggtattaggttttctagacttttaagttgttaaccatgaccccgggggcatcccccacatttggcggtgcacccaagccagcccttttagctaagggtccatagcaactgagattgggtgtccccatctcattcaccatgtccttggtgccacttgcaccaaatgttcaagttagatatgccgagccacactaaacaatctaaccgtgcatcacgactccaaggcatccctcgcttggctgtgtgcccaaaccagtttcctcattgagagtctatgaccaccgaaaaatgagtgtccttatattctaaaccatcaccacgccctagtgatttgggactcgaacccaacctccgtatatgcatttacggatggcatcacacaagatgcctggcgtgactccccacgccggtgcaccaacttatacttaaagcgcgctatagatcacagcttaggaacctagttcctctacactgccaagtcctctcgcttgacaagtctatgatcatgcatggactcctccatgctcggccccatgggctatcccttttgaagttagcaccttcaactaggggatttgttcccctgactcgccaatctcacttagcaagtcatctggccaccgtaatatagtttatgcataaacgtgaaagtccttaaccatcgacttttgttcaaagccctctctttgaacactcgggaactacttccccaaccttgatagcctcgcctcatagccagcttcaagaccacgcttctactgcgccactttgattttgcgcgctctaggaaccatttacacttggctttttaagtacttatctacctagaattgtctttgggaaactctaggaactctattccttagcttgctaaggcttctcctttgcaagctccctactcaccatatggtccaacatgaataattccacattttagactttccatggcaccgtagttgctaataacaacatcctcgagcaccctcttgattttccattcccaacttgcataaccatcgttagttatgcccttcgatttctatggttcaattccatcccaatactacttgccttttggccccatatgtttcctttagttattctcctccagactagaaggatagctttgcacattttaccatgccttaacaagtattcataaaaatgaacctacccgatagcttagggagtggttcctcaatttgggcatgctcaacttataatcccacacatcgggattactgttgctacttatggccctcgatatgcccatcattaaacttgccaaaatcttatctttggctttgttcaaatcaggtaaacagattcctcccgtctccacaactttggaagtttggatggcatctcctatccatcatttgctaaggacttagtcccttgagccttatctattgctctcgtgacactaaacaccacggggatggtccaaagttgagttgagctcacgagttgagctcaattcaacacaagtcaatgtaagtcaatgtagtcaactataactcttacaaagaaaatctatgttaaaaaaattaaggttctgacaaactttaaaatattaaaatatatgaatacctaggtcaaaagtttctactagattgagttatttagaaaatattaagttcatgagaacctatctattttcttactaaagactatctttacaactatcatattttgattttcttacaattcaataatatgaatcaagataaattttttgaagggtagccattaatagtgtataatggtaaggcaatatatatttacataaaattcattaattctagagttcttaagtaaaataaaatacctgtaagtaagagttgtagggcaaatcaatgtgagaatattaatttcctttcattatcacaatcttcatattacacttctagtccttattagaatgtaaagaccattatatagtaattcatataaaaaactcttactactacttacttgcctatagcacaatcctcctatatgagaaaactaaggtatatttttgggatgaatccccactagcattttttgagagtcatttgtgaacaataataatagaaatcaaaatattttaaaagactcaaaagtgatatcacatcaaagaatcaagtttatctacatttccaagattgaaaggtaatctcacataagagaatgcatgtgggcccgtatgcttgcatactctgctactataatataatttatatttccttgtgtatttttctagaaagttcaagtgtagaaaaaaaaatatatagatggtcattaaaatgataaatattctagcatgtgtatctagaattctagaagctcttctattcataaatagactatgattttgaaatctcatttctgagatagacatttcaagaatctgagtattattagtgtcataataaataaaccttattcccaagactaaaaattaatatataaatgccaaaaaagttagttattatagtatttttattatccttacgctcctaaaaagtttaatatagaaatggctcaaaggaaagtcattactactcgtctataagtccctaacatctcatatcaccataaccatattacaatcttctttctattaaaggtttttataaagtcaaactaaagcttcctatatacaaaattttgaatattgttactaaagagtgattaccttcaatgcttcaagagcagtgccatatgtttttgcaagatcttgctcttggtatggcaagactacttaaaagcacaaaatgctattatattcaatgtctaatatgttactttttttttggacaagacaaatgtcttcgttacaaaattttcttaaattgcctaacaatgggtgtagaaagtgtggatgtacaataaattcaagaataaattatagacacatacccactatttcttcatggtgaggaacaacatccccatgggaaacaatgcattagctagtgtagaatatgggttttttaggctattgacaaagtcaatgatggggagttttctcaagttgaagtctattacacccaatccatagaagatctcactcttgatttagtgggaattaatgaacaaattgagagtttaattctaagatgcctaatatgccttttttttcttgggtcaggacatttttaagggcttttataattttcttgagcattgccacaactgctacataattagtgttatcacttcatataattgttgataagatattgaaggatgagatgacaacacacaaacattacaaattgatggttgcatgtgagaataccaatttgcaattatggaatatgatattaacattgataactaacactgacattattactgatgattatgtattatatatgataggattttcttctcaagtaaggattcatttaactttcttctatgtcatcatcaacatgtcatttccttctatgcctccgtctatattgggattgtgctcacttcatttgctaagccatagcctttgcataatttaatagacttctaaaacctccaactctaaaaactcaaggtgagtgtgatatataaaacaaaactaaatatgttatgaaatcttaataaatataaattacctccttgaggttagaggtaactctaagccagtgtttaaataaatgatgtttttaatagcaaacaccaatctactagaattatatgctaactccaccatataaccattacttattgtgcaatcagtcacaatactatctagtgagtaatagagctcaagcaaaacttgcattgctgatggagtttcaaatcaatacctaggaatgtattgcaaatctactcaaccacaagattcaatatgatgttagtggcactattgagctcacccgaggccagaaactgcccgaggtggccagcccgacctcg

SEQ ID NO: 14841 - DNA, 29772 bp, Selaginella moellendorffii
  Intron number 10 from transcript 422901 (locus 422901) der ived from phytozome v7.0 (chr-ID scaffold_59; pos 249000 t o 278771)
agagtcaggttggtgaagtttgggtgcaaggactcatggaaggcgagtacacggatttgagcgtcgaggagaggctgtgtggattggttgctctcgtggatgctgtcaaccaagggagcactgttcgctcggccatagaggtgagtttttctttgttttcatcactcaaagtttgcatataaactttgcattccaggagcgatacgaggctgcgtcggctctcaagagacagctctgggaggaagtccagatcgataagcgtcggctaaaagaagaatgcagcaaagccgaggctgcaaaggtcgacgagacgaatctgcaacaacagcaagtggatgagaaaccactgctgcaagctctggagaatggatcacaggaggctcaggagcagcagctggatggagatgaagatggcagctccaatcctgcgcaagccttgagcgaagatccaaacgagaggcagcaaaagtgtgcttcgcagcactcggacaggtcccgggccgatatgaaagccgatatcaggttgcgagcggagaaactctacgttattcggtcgcttcctctaggtttggaccggaggcacaaccggtactggcagttcgtcactagtagtagcggacacgaccctgggtgtaaaaggatctactttgaatcgcatgaagatggccactgggaagtcatcgacaccgaagaggtgagtgtagtatccttcatctttttgagttgcatggctttagagaaatgtttgttctcccagttttcatggatggttttcgtttcttacgtgcaagagttttcttttctcttctcttattggtcactcactaaacaaagtttgtgtccatttcggcaggctttgaatgcgctgatgaactctctggacataagaggcacgagagaagcaaatctcttcgtagctctcaaggagcttgaaggctcgctaaggcaagccatgagcagctctagcaccaagcagaaccaagaccaccaccaaagtcaccacaccggaaatggaaatggagctggagttcaagctggagctgcgagtggaaatggaaatggaaacgactcttgcgaggggagtccatcttccagcgccgtggttggaaatggcggcaaagactcgacgagctccgacgctcgggtaggatcgcttaaagtcgagctcggaagatcagcgtcggagaactccggtgccatggaacgatacaaagacatggaaaggtggctgtggaggcactgcagcgtcaaggcgctgcaaagaggtggcgagaagcgacgagagagcgagagcgatgggatgatcgccgagtgtgagtcgtgccatgacttgcgctgggccgtcgacaagcactgcccgttttgccactccaccggcgaggaagatgtctggagtgatttctcgcagcacgtccgcgactgcgagcaaaagatgatcagcagggatcccgcctggagaatccaaggtggtgttcttcctccgcgaatacagttgctcaagaaactgctgtttctagtcgaggtaactttcgtttcttctattgcattgtcttgaaacgcttccttcttccctagatttgtattccttgcgaggcacttaagcctgcatggtcgacaaattcttacagaaaggcgtggtgtcaaaggctcaaggttgcttcttcggcaggagaaattctccaggtagagttaaaagttttggagcttggtgctatctttctttatctctttttcttgttttctttgcaggcattcatggatctggagggagcaatcgacgaggactggatctcttcctcgtacgagtcgatcgagcaagttggcagactcatcggcattcagagaaaaaatcccccctggatcccgcagacctccgctgctgttgctcttcgactgatggtctttgactcttcgatcgcctacaccgaagaacaaaagcagcagctcatggacaggcaacgaagagtaagccatccatccatttcgcgtgttcttttgcttacttttcctgagtttttactttcgttcgtgtttttaagttgagaatcggttcttacgtttctctccttccaggttccaatgagaagatcgaaaggagaggcccgcgaagttttatacgaggctggtagtgctaggccggcagaaggagaggaagacaaagagaccaaggaggcagagtttaattctcaagaggaggagctaccaccacagttttacgagaggagtggtggtgactttggagctcatccatcttggagcgctcggcaagagagcgccgccgttctactggaagaggaagaagaagatgatgaagacgaagataagaggctggcaatgaaagctagtggcgagagtgacgatagctcgcagatgaactgggaaggccaggattctttcgaggagctcgagcagccaggccatggaagcctccatcatctggaagagctggagatggaggaggaagaggatggattgatgttggaagaggaggaggagctgagtgacgaggaagaggagagcgaggaggaagagttccagcagcaagcgtcgagcagtgatacggacgaagagcaaaacaagcacgacaacttggtggtggccaagaacttgatcaacatcaatgcgagcttggaagaaagcggtgatgatcttcatactgctgctgctgctagcaagatcaatggcggttccagcgagagagttgtaaactgcggcttgacaagcgagttagagtttgagcgggggacgtatgaggagtgagtggaagttttactttctcccatacagcgaaggtgtctctcttctcgtcgtacagtttgatttgtgaattcaaccctgacttttgtatgtaatttcttctaggaaaaaaggtttctttattctatgaatttattgattgctttgagatgtcctagattaaacatttgacagaaggcagaagagactcgttcttcattttcttgatacttaaaaaagtgatgtgtgggattatgattgaacgcttttaagtcagaatctgtgctacatacctgattaaggttaggaagaattataatccatgtttgaattaaatccagaatattcttattctagagtcttagaaccctaaacgtccaaaccctaaagttgagggtggcatcgatggatgcatcggaactggagagtgacgcagcggcatcggaactcgagagtgatgcagcggctgagttgatgcttttggaagaggagccattcgtgagaggtagtgtcaaagcttaccttgctcagcctatgagggctgtgcctgctggggttgacgcatatcatcgtttcctgttgtcgacatcacctcctctggtggatctctgcccgcaggacttcgagacggactgctgggatagcttcctctgtgatatgaattcttggttctctgggcttccagacaggcctctgagatcaaagccagaagtgctgatcgatcttcatttcagaggtttccttttctcagcggctgacacggtgctgcaactcgtaaagggacccaaggatgtgtgtgctggcatggcgagctatgccattgggaactggataggtgcgccggagcttgtggtgagcagcaagggccatagcccgcttgttgttggtgtcatggtgggggtcattgacacgggagcagttgcgagggtctatgcttacatgctgagcagtggttcttcgtttggggtcgtctcatcctacgcagagacgaagttttgcgcgcgcttggacaaccggtttctcttgtcagaccctgttccacttccgcttatcggcatcaggtttctgattcacatggctactggacacagggtgcagcagagtaccaggccactaccttctccacgaggctttgcgtcgcgctttgcgatgggtgtctttgagacgtgctgccatgtcgcaggggtgcatcgcatggccaagatggtccacgaagtgggcagcttggaggctcgggatcttcagattctagagtttttgtccggggccacgggaaggatttccgctgtttaccgtgctctgtacaagggcaaaaacgtcgtcgtgaagatcacggacttgaccacaggttaaaagcttatttctaccagcccagagctttcaccaaattgtgattggcttttgcaggtgttacaagtgtccaagactgcttgatgaagtgtgtgagggaggtggatgcgtacattcggctgcataagctgcagcgaacttgtatcccttgcttgtttgagtatgggttcttgtgcggcgggatgttcttctgtgtggtgatgtcggatgctggcaactcggcaggagaggggtggtcgccggtcgatcaggacgaggtagaggccgtcgtgtctcgagcacgaaaggctcttgagagctttcatgctcgtggagtggccatgggtgacctttgcgtcgagaacatacttgtttggccacatgacaagagagtcgccatagtcggctttgaggagtgcctggtgggtccagcttgttctaaggtggccatgggcaacgatattattgctcttcgcgagtgtgagcttgtgttacagcagatggtgttacaggagatggcgtccatgaaagcgacgcgctcacgagacacgaggggtactgccacagcggactgggaactctggcttgcagacgtggtcgattctgccgagtctggtgtgaatctagaggatacagaggagacagaggatacagaggatacagaggatacagatacagaggtttgtttcagctttactgctattaggtacttattatgtcttgcaggagtaagctgacgaggttctccagctttgttctttctgtgctttcttgttttttcttttcctttgctgtcttacttctaatccactcacaaagattagatattcatgatatttcccagcagtttgtagaagttttctagagttgctaagtggtggaatagtgcatggccaaacttcacagtaagcaaaggcagaggtccacaacgaacgggaagctccacaaagcacctccacaaacagctttcaggcttgtgaacagtaacttgtcaaaagttggagaggagagcaaagtcaggtgggactcaggcatcagcagcgggagctggcacagactttgatggtgaagccaaggcttcctccaccatctctattcctgttgctcatctttgcctaagagggtgttgtgtggagggttcttgtctttgaggtgttaaatttgattatagtgatcacaggctttagaaaagctcgaattaagacggttcattgatgaggatagtttgaacagggctacggcctggaagacaggagaacatcatattatacatagtagaacatacaagatgttcacattctagctgactgccaggacttccaccaatgcatgaaagaactgattgccacctcctgtgttgccactgcaaagcattaggacgcatttgtatattctaggcatcttctatgtactgcgtggcgcctatgccattcacttttttgacagaatttccaggaatgtttgctgtggcggtggcgtcaaagggactccaccactgtgttgctggctacggctgctaggtgaagactgaaaagggaacaatggctttcctcacaactcatatgacaaggcagcaggtttaaaccaattagtttatgagagaagcaaaagatttttcctgcagcttttctctttggattgccttgccaagcctatgtggttttccagaggcaaaaagggattgaattcgtgaagtttagtagcatgaacttaattcttctgactttatgtatttggacatgctaatgattatgatgatgccttttaacaattgcattgtttaaatcaaggggcatttgagttaattatgcaattcaatattcaatctctgaattttttatttcgtacaaagccaaatgtataatgcataaagttggacatgttatggctaacactttgttaagattttgtggtacatttgcactaatcacccatgacaatgctctatgacttgcacaatattatgagatatcacttctcccacttatagttgcatatgttttaactccatttcctgtaaaagatacttttgtttttatatgatgttattattacttatgctcaaaggacaaaagtaaagacataatcatggttgtgacatttgttactcggtgtgtgatgagattacttatatgtattagtgtcattagtgtttcctagattaacatcttctatttcttgggtggaggccttcgcatcaataattccttataggtactactgtaatggaaagtcatgatataaaaattctttagagtaataagagttttttatccttcttttggaagaaccatcaagaagttcatttagcatcaattcatcaaatattcactttccaaactttttttttaataaaaggtcctttattattttctttatattggttgatatatgtttaaaaatctatcttttattgctctgcttgttgccatatattgccttctacaattgcattagtataatcatgctaaatgtgattttgagacttctcccctttatataatactctttcatatcttttttatatctcttgtattctctactttatctttttattttcacctctatttccatcattgttttttccattacttttttttttttttttctattcttctattcccttttcaaatcacttgaatggtttttagttaaggcaattgactaactcaagaagaagtatagtgatcttttcacctttgatttatcttttgaggttaagattgcatccatcatccaatcacaattaaagatgattgaccaattaagatttatttttagcaatcgttataaaaaagattaaaatcttatatgcaaatagtaaggaaatgttagaaaaaaggtgttatttgaaagtattgaaatccttgaatatgtgagctttatcttgtgataaattttaataggagcatttaattttatataaactattatgtaataaacgatgtaactatatcaaatatgtactctcttcctgatactattgtttggggaaaaatcattaattcaccaagttaaatcttgtttctaaatactaagaagtgttaatggttggaaagaaaaaaaactttttatacactatttgatttgtacgagttcttggtgatgctatttgatttaaacaatactttaacataatagatgataaataaagttctttataatatgtcaaaaatggcattgacttcatcaatgatatctttatccttttgaaaaggatatgggaagagcacatttgtgatatccacaaaatgttgaacaattcatggaaagatagtttgaaattaaagtgattgaaatgcacatttaggtctaaagacatgacttatctcgagtattatatttctcctgaaggcttgtaagttaattttgataaatttatgtcattaatcatacttgcaccattccaaatgttgatgaagttatcaacattattttgtatttggtcttaggactgcgagtaaacatttaagaaagtgttaacaactctttcaaaattggcaactacacttgattttttatcttgcatatatatacttttagtattggtatcgaatgtgtcttgatgcaagagagcacaagtgtatttagttaacatcatcccattgcatacatcaactatattacaactaataaaagtgaactacacaataaagaaagtctctcaaaaagtttcatgcatacttgcatggttctttaatgttgctagagagtaattatatttcaatcactttattattaaagtgaaagaacttgaatagtcatattgtttaatagaatttgaagctttaaatatataacttcgaggttatttattgcttggggagttctatagttgatattaacatcttttctttaagcttcttttgcttcttttttttcatcttatgttgttaataagcttattattctaatattgttggattttctagatgagaatatagtgtcattagtagttgttatgtttgatatttaatatttataaggtacaaaaactaaatttaccttctcttgacaaggttcatgagatttaaaaggttgagttgtgcatttaaagacttcattataagtttaagaattttgtatcactcggataacttaccattttggcatttatattttcactattgtcttaaagatgacctttactttgttttttatgaccatttatggcttatggtgcatttgatttttattctacactttctttatgcttactaggtgccttcgacatttctaatctaaatagatatataaaacattgtcatatgactaagaaatatgcatatatcatggtatagatatccattggtgtttcattatataaacttttctatagttatgatctgatattgccaatcccaaaacctatgagcattcttctattaatttgagtcaagtttgctaaacacttaaactatatataaatgggataacaatagtgttacaacttgtatcattaaccacctatggagtataaagtaaatatgatttattttttcttaattttataatatataatttatttaaagggctccttacctaaaagagatagtattgaatattacagcaagctgaattgcaaatttataaagtttagcacaatatttatctaatgttcctctagattctaacttatcaatacgaacacctgggatgattgtgaggtctagatatatgaataatgctatatactattattagtatagtgggatagcttttagataatatataataatttgaaatattaattattaagcatataaaatctataattcagaattttccaacaataatagtgggagactttgatattaatgatgaatcaaaaggattaataatttgctacacattgcatgccgcaatgcttagtttgcttaatagtagtgttattctttaattataaaaatgtttataatgtataaacacaagattaatcttatttaatattaatattagatggtagaataaactagaatatactaggaagtgttaagtaaattataaacatgtttataaattataaatataagattatgagatgataaaatattctagaatatttaaatatattttaaatatattcactaccattattttagctatgttcctaattcactccccgcttaagcaaacgaaaaatgtgttttctcaagattgacatgcatttgttaaaaccctaggtcttggttatgaaggtcctatgctctctagaaacagtgggcgaagggactcctcacgtcatctggagatcaatcctgaaaatcttctagtgggcgccaatgtggaggaagaaaggctcgatctcttctacgtggacggcgtgaagagacagaaattcgctttctggggtggaggtggtggtggagcagtgatggccgccagtggcaagaaagaagaaaaagagatctaagttttgccttttatttcttgtgtttggaactctcgaggttttacggtttcaaatgagggtttggattcagcatagcgaccgcccggcgttacagttcgaggtcggcgcagatggtttgatcgatgtagcggccgtttgcaagcagttcctcctcgatccgaatgcaaatctccacgtttcaggagtggccatcgagatgattgctgctaaggcaagtagaactctagattctatcttgggggcggccactgaaggtggggatggcacaactaaagacaatgccttgatcataagggaggaccgttatctttggtttcgacaccagaaaccggtatttctcttgttttctgaagttttttgtgctcatacgtgatgtccaggatggttcgaccgacacagttggattattctcggacggtctttttgacttgcaagacctttgtagcacattcggtctcgacccctcaagcgctgtacgtgttgctggccttcgtctaaagtttacggacaaaggaaggagtctacacactgtccggaaggttcaaggtgttggaggcatcgaggatggctcgtcgcgagatactgcgtttactgttgaaggctcgcctgctacgactcgtaagttatttctttcttttttcttttcgttcttttatcataggaaactaaacaactcccatggtttgcagccggcctggccgttattcctgacaaattcaaagcagtctgtagtgtatcaaacccgagcgccgaagttgccacgctggaggggattgaaagaactctggacaacaagcttttcaaggatatgagagcggaacgtggtatgccgattgcactcggagccagagcattcggaatcttcatcgatactttcaactccaaggcgccccttgaggcaggacttctggctgcagcgcgtgaccttcgtgaccgtatgaagaagttttatcggacggaagcacttcggcggcaagaattcgcgaagttcctcgaatcgtatctggacgacgacgataagtacgtggtggttgctaaccgggatgcagtaaagttaaagatcgggaagcgatctcgggatgacagcagcgtgaggaggactcctgatgtacaggtgaaagccaggatactgggtatactggtggttcttctcacctgcgaggtgaaaccggagatgggtttcaatggcgagccgctcttggaggccctcttttattatggcactgatgctgcagagagcgttgttgttagtcggcaccactacacaggctgtccagagctgattgtcgagcttgttggccccaacattcgcgttggcggggccatatatcacgacaaggccatttatcagcccttgaccgactttctatccctgcttgatttcgaggatgatgctcacctgttcaaggtaagtttgatactggatggaagcttacattcagtgctcgttttcgttgcagttgatgcggtttcttcatgccactcgacaagctttgaaagaactcgtgaaggtgtacactagcgctcttacactaactggagtgcctgttcgagtagataccctgcactggccgtatgcgcttcgagaaaagtatccagatgctgctgcgatccatcagataaaaaacactcttgtttacatggttacgactggcagtggacagcgaagggtggtgaagtttgtcaggcagtatggggaggatgctcatgcgcagtgggagcaagctggatatgcaccgcaccatacgattgagcaactcccaggcggttggaaaatggtggatatggactgcctcacggcagcgtatggctggcgatcggtgttggagctccgtggcatggaggagacgacgtctgatacttggaagaccatgcaggatgcagtttggcgggcactactgcagctacaagctttgcaacctacgatggtgcatggtgatctgaggttaaacaacatcatgtacaacgtccaaacggggcagccttgtttcctcgatttcgattgggcaggacaggatgagatggttcactacccactgaacttgagctctaagattgcctggccagctggagcgacgcccatgagcaacatcaaggcgatccacgaccgtgaactccttcaaaaggagcttgaaatgatctcgacatgaagcatgtaaggggtgcggatattgggaccaccaggacgtcccctagcaaggataccaaattgtcttgtcagaagcaattaagttctaagtaatggaataatttgctgtgtttaagtaatatttcccaagttgttagatatttaaatttgctatgcttttagtaagtattttgtgtagttgtatcaaagcaattgcacccatgtatcttgctattagaaatttaaagctctagatcctgtcaagacaggttctaaagctgttatgacatgatttttaattaaacttcctattcaataacaacaagttgaataacattatagtggcattaggtgttattggccttgagggacgagcatatacttttattttgcactggtaaacaaccaagatctaaagtccataaggtcacttcaacattaagccatgttaatttgacatatagattttagatttataactaatactaaaagtttgagtataaatcccttttcaagaactattattctttttataatttcttcttgtgtagccatttaatctttcaatatgcaagggccacaacataaaaggctgtccatagaaatgctatagaagactgctagtgacaattattacttatggcttaacataaaggtaaacttaaggtaaggaggttttaatttagaaatttaaacaacagtttatattattaaaccttgattttaacagcaaagcatctacaatatgaatagaggtacattgatgttaaactcttaccatctaatatatagagccaaatcaaagtatttaatatatataatgtttctttcctcagctttatcctgttacatatacaataattttagcaagggacaatttagaaaaatcctctctctttcttgtttggattagtgttgcatgagtctagtgtccagaggctttgatcacgatttgctttctcatttttcgagttagttttgattctttgactccatatgagtgataacaaaaagttctgtacctagcttcccattgatttagtttgcaaatatgatgttttctttggatggtatgcagctctttgtgactatgtgagtgtgaatgagaatatcagacgagacaaagagaaatgaaaagtggctggcttactaatattaattaaaaactagtagtaaacatttaaatatttaggattttataaatgagtaactcactttagaattacactaacaaactaatccttacattgaagatgccttcctcttcacagtgaggaagggagggaagggagggcggggcatgatgatagctgtggggatccatgcctattgttgtctggtagatagcatacttgatggctcccactgttcttgctagcagccattgctcaaaagcctatgccatccaccagctataatcgtctattggactcttgagcacctcgagatcaaggccaagctttgctgtccatttcttgagctcagatcaccaacctccatttcgctcgtatacacaggctgatggagtcatcgatagcttaaatcaagagctttcgtttgcagctgccgctgggtcttcacttaattgatcatccgtttccacacaaggagctccaagggccataattcagactcgaacagatgataggatatgacacatctcctgtatgaagctccatgcggataaagtggtattggagctcctccacttgatcccagagagcatccatcattcctagacaagatgaccgtggagagttcagctatgaaaagttgtcgcttggcacttcagtgggtgacaagtgcattggaacaatctgagtggaatgcaaagtatgcaccacgtgccgccgtaatgcaatctatgatccccacctttcgtggattgttcttgtggataatatatctgaggtacttgtaatggtctactttctgaagtgcaatcccatggtaggagcataccctggcccaacaccattgacttccatgcatgtggcctctcacagaattcgctgagtgcattgaggtaagctgcatttggcgagctgaggagccgaacagagtatatcatttacgtaaagcagtgcatataaatacattcccgagagttggtatggcgtgagtgttttgccctgtatcatggactctagtgcgtcaatgtagactgcgaagagtcagccgtatgcttttctttaacgtccgttgccaaaagacgattacggctacgcatgaagtggcggtttctagcacaagcatagcagcggcgcaaatgcaagacagtctcaggcattgcaaagtcccctctcgccatggcgttgcttgctactacaaacccacatgggccttatggatggtaatctgctcacttaggagagatttcaatgccaggatagcccgcccaagtggaatgtgtcctttctccaccagatgcccagtgccgtgagttatgtgcttaacagctcaggcagcaaactgagatccaaaagctagaggttacacatgtgagacctgggccttgcaagatgggggcctgagcattgtatattacttgctgctgcggcgtgctaaaatcaactgagtccccaagtcaaaccatgtgcaaattccctccactgcacagcgctgagttcacaggtccctgctacagcacctttagctgggataagagtgttgttgacactttcagagggaaattgcgtctatctttgcattcaggtggaggctaaaccctaatagtaataattaggtattattattatatgcgatggttgtagcggagatgataagcataaaagaaatacgcttatcaaaaagtatattctcattcaagcaagattccagaatcttgatttgtttcttaaatttacatttgaaacattacatttgaacgttactagggttctcacacatatcatggggatcccggcgcgaggggatggcggcgagcagcggaggtatttcagagaaacgccggatgtgagcgtcacgccggtggatttcctgtgctccacgaaggagagcgatctcttcctggcgtggaatgtgaccaagatccagggatggtggaaatctagggcctgcgctagagaattcgctgccatggtttctcctttctccgctctcttgagatttccttcgtttcccttttggtatttcagctttttctctcttttttattttgttttgttttggcagaaagaagctgcgcgtttgctgcaagcggcctggaggaagcaccgaaatgccaggagaatacgaagaaaacggggccgatctagaaattcactgcacgctgctgcatggacgatccaacgcatgaccgattgtgtggattggttgctctcgtggatgctgtcaaccaagggagcactgttcgctcggccatagaggtgagtttttctttgttttcatcactcaaagtttgcatataaactttgcattccaggagcgatacgaggctgcgtcggctctcaagagacagctctgggaggaagtccagatcgataagcgtcggctaaaagaagaatgcagcaaagccgaggctgcaaaggtcgacgagacgaatctacaacaacagcaagtggatgagaaaccactgctgcaagctctggagaatggatcacaggaggctcaggagcagcagctggatggagatgaagatggcagctccaatcctgcgcaagccttgagcgaagatccaaacgagaggcagcaaaagtgtgcttcgcagcactcggacaggtcccgggccgatatgaaagccgatatcaggttgcgggcggagaaactctacgttattcggtcgcttcctctaggtttggaccggaggcacatccggtactggcagttcgtcactagtagtagcggacacgaccctgggtgtagaaggatctactttgaatcgcatgaagatggccactgggaagtcatcgacaccgaagaggtgagtgtagtatccttcatcttattgagttgcatggctttagagaaatgtttgttctcccagttttcatggatggttttcgtttcttacgtgcaagagttttcttttctcttctcttattggtcactcactaaacaaagtttgtgtccattccggcaggctttgaacgcgctgatgaactttctggacataagaggcacgagagaagcaaatctcttcgtagctctcaaggagcttgaaggctcgctaaggcaagccatgagcagctctagcaccaagcagaaccaagaccaccaccaaagtcaccacaccggaaatggaaatggagctggagttcaagctggagctgcgagtggaaatggaaatggaaacgactcttgcgaggggagtccatcttccagcgccgtggttggaaatggcggcaaagactcgacgagctccgacgctcgggtaggatcgctcaaagtcgagctcggaagatcagcgtcggagaactccggcgccatggaacgatacaaagacatggaaaggtggctgtggaggcactgcagcgtcaaggcgctgcaaagaggtggcgagaagcgacgagagagcgagagcgatgggatgatcgccgagtgtgagtcgtgccatgacttgcgctgggccgtcgacaagcactgcccgttttgccactccaccggcgaggaagatgtctggagtgatttctcgcagcacgtccgcgactgcgagcaaaagatgatcagcagggatcccgcctggagaatccaaggtggtgttcttcctccgcgaatacagttgctcaagaaactgctgtttctagtcgaggtaactttcgtttcttctattgcattgtcttgaaacgcttccttcttccctagatttgtattccttgcgaggcacttaagcctgcatggtcgacaaattcttacagaaaggcgtggtgtcaaatgctcaaggttgcttcttcggcaggagaaattctccaggtagagttaaaagttttggagcttggtgctatctttctttatctctttttcttgttttctttgcaggcattcatggatctggagggagcaatcgacgaggactggatctcttcctcgtacgagtcgatcgagcaagttggcagactcatcggcattcagagaaaaaatcccccctggatcccgcagacctccgctgctgttgctcttcgactgatggtctttgactcttcgatcgcctacaccgaagaacaaaagcagcagctcatggacaggcaacgaagagtaagccatccatccatttcgcgtgttcttttgcttactttttcctgagtttttactttcgttcgtgtttttaagttgagaatcggtccttacgcttctctccttccaggttccaatgagaagatcgaaaggagaggcccgcgaagttttatacgaggctggtagtactaggccggcagaaggagaggaagacaaagagaccaaggaggcagagtttaattcccaagaggaggagctaccaccacagttttacgagaggagtggtggtgactttggagctcatccatcttggagcgctcggcaagagagcgccgccgttctactggaagaggaagaagaagatgatgaagacgaagacaagaggctggcaatgaaagctagtggcgagagtgacgatagctcgcagatgaactgggaaggccaggattctttcgaggagctcgagcagccaggccatggaagcctccatcatctggaagagctggagatggaggaggaagaggatggattgatgttggaagaggaggaggagctgagtgacgaggaagaggagagcgaggaggaagagttccagcaggaagcgtcgagcagtgatacggacgaagagcaaaacaagcacgacaacttggtggtggccaagaacttgatcaacatcaatgcgagcttggaagaaagcggtgatgatcttcatactgctgctgctgctagcaagatcaatgggggttccagcgagagagttgtaaactgcggcttgacaagcgagttagagtttgagcgggggacgtatgaggagtgagtggaagttttactttctcccatacagcgaaggtgtctctcttctcgtcgtacagtttgatttgtgaattcaaccctgacttttgtatgtaatttcttctaggaaaaaaggtttctttattctatgaatttattgattgctttgagatgtcctagattaaacatttgacagaaggcagaagagactcgttcttcattttcttgatacttaaaaaagtgatgtgtgggattatgattgaacgcttttaagtcagaatctgtgctacatacctgattaaggttaggaagaattataatccatgtttgaattaaatccagaatattcttattctagagtcttagaaccctaaacgtccaaaccctaaagttgagggtggcatcgatggatgcatcggaactggagagtgacgcagcggcatcggaactcgagagtgatgcagcggctgagttgatgcttttggaagaggagccattcgtgagaggtagtgtcaaagcttaccttgctcagcctatgagggctgtgcctgctggggttgacgcatatcatcgtttcctgttgtcgacatcacctcctctggtggatctctgcccgcaggacttcgagacggactgctgggatagcttcctctgtgatatgaattcttggttctctgggcttccagacaggcctctgagatcaaagccagaagtgctgatcgatcttcatttcagaggtttccttttctcagcggctgacacggtgctgcaactcgtaaagggacccaaggatgtgtgtgctggcatggcgagctatgccattgggaactggataggtgcgccggagcttgtggtgagcagcaagggccatagcccgcttgttgttggtgtcatggtgggggtcattgacacgggagcagttgcgagggtctatgcttacatgctgagcagtggttcttcgtttggggtcgtctcatcctacgcagagacgaagttttgcgcgcgcttggacaaccggtttctcttgtcagaccctgttccacttccgcttatcggcatcaggtttctgattcacatggctactggacacagggtgcagcagagtaccaggccactaccttctccacgaggctttgcgtcgcgctttgcgatgggtgtctttgagacgtgctgccatgtcgcaggggtgcatcgcattgccaagatggtccacgaagtgggcagcttggaggctcgggatcttcagattctagagtttttgtccggggccacgggaaggatttccgctgtttaccgtgctctgtacaagggcaaaaacgtcgtcgtgaagatcacggacttgaccacaggttaaaagcttatttctaccagcccagagctttcaccaaattgtgattggcttttgcaggtgttacaagtgtccaagactgcttgatgaagtgtgtgagggaggtggatgcgtacattcggctgcataagctgcagcgaacttgtatcccttgcttgtttgagtatgggttcttgtgcggcgggatgttcttctgtgtggtgatgtcggatgctggcaactcggcaggagaggggtggtcgccggtcgatcaggacgaggtagaggccgtcgtgtctcgagcacgaaaggctcttgagagctttcatgctcgtggagtggccatgggtgacctttgcgtcgagaacatacttgtttggccacatgacaagagagtcgccatagtcggctttgaggagtgcctggtgggtccagcttgttctaaggtggccatgggcaacgatattattgctcttcgcgagtgtgagcttgtgttacagcagatggtgttacaggagatggcgtccatgaaagcgacgcgctcacgagacacgaggggtactgccacagcggactgggaactctggcttgcagacgtggtcgattctgccgagtctggtgtgaatctagaggatacagaggagacagaggatacagaggatacagaggatacagatacagaggtttgtttcagctttactgctattaggtacttattatgtcttgcaggagtaagctgacgaggttctccagctttgttctttctgtgctttcttgtttttttcttttcctttgctgtcttacttctaatccactcacaaagattagatattcatgatatttcccagcagtttgtagaagctttctagagttgctaagtggtggaatagtgcatggccaaacttcacagtaagcaaaggcagaggtccacaacgaacgggaagctccacaaagcacctccacaaacagcttgcaggccgcccaacatttgcttcctgtcaaaagttggagaggagagcaaagtcagttgggactcaggcatcagcagcgggagctggcacagactttgatggtgaagccaaggcttcctccaccatctctattcctgttgctcatctttgcctaagagggtgttgtgtggagggttcttgtctttgaggtgttaaatttgattatagtgatcacaggctttaggaaagctcgaattaagacggttcattgatgaggatattttgaacaggcctacggcctggaagacaggagaacatcatattatacatagtagaacatacaagatgttcacattctagctgactgccaggacttccaccaatgcatgaaagaactgattgccacctgtgttgccactgcaaagcattaggacgcatttgtatattctagccatcttctatgtactgcatggtgaagactgaaaagggaacaatggctttcctcacaactcatatgtctatggcaaggcagcaggtttaaaccaactagtttctgagagaagtaaaagatttttcctgcagcttctctctttggattgccttgccaagcctatgtggttttccagaagccaaaaagggattaagtttgtgatgtttagtagcacaaacttaaatcttctgactttatatatttggacatgctaatgactatgatgatgccttttaataattgcattgtctaaatcaagggccatgtgagttaattatgcaattcaatattcactctctgaattttttgtttcgtacatagccaaagatattataatgcataaagttgggcaacactttattaagatcctatgctacgcttgcaccaatcacccatgacaatgctttatgacttgcacaatgttatgagatatcatttttcccatttttagttgcacatattttctataaaagataattttgtttttatatgatgttattattgcttatgttcaaaggacaaaagtaaagacatagagatggttgtaatatttgttactcggtgtgtgatgagattaattatatgtattaatgttattagtgttttttagattagcatcctctatttcttgggtggagtccttagcatcaataattttttattatactaccgtagtggaaagtcatgatatagaaattctttagagtaataagagccttttatccttcttttaggagtaccatcaaaaagttcatttggtatcaattcatcaaatgttcactttccaaactttttttttataataagaggtcatttattattttctttttattggttgatatatattcaaaaatttatcttttatcagtctacttgttgctatacattgccttctacaattgcattaacataatcatgttaaatatgaccttgagacttctcccttttatataatactcttttttatcttttttatatctcctccattatctacttcatttttctattttcacctctatttccatcattgttctctccattacttctttttatgttttttttttctattcttctatttccttttcagatcacttaaatagtttttagttagggcaattgatcaactcaagaaggagtatagtgatctcttcacctttgacttatcttttgaagttaagattgcaaccatcatccaattacaattaaggatgattggccaatcaagatttatttttgcagttgtcataagaaaaggttaagattttatatacaaatatcatagaaaaaggtgttatctaaaagtatcaaagttcttgagcatgtgaatttcattttatgataaattttaataagagtatttgattttatatggactattatgtagtaaacgatgtaattatctcagatatataccctcttcctaatactattgtttggggagaaatcattaattcaccaagttaaatcttgcttctgagtactgataagtgttaatggttagggaggaaaaatactttctatacactatttgatttgtacgagtttttagtgatgttatttgatttgaataatgctttaatagcaaatgatgaatgaagttctttataatatatcaaaaataacattaactttatcaatgatgtcttgatcctcttgaaggggatgtgggaagagcacatttgtgatatctataaagtgttagattatttgtgggatgatagtttgaaattgaagtggttgaaatgcacatttgggtcgaaagacataacttatcttgggtactacatttttcctaaaggtttataaattgattttattaaatttgtgtcattaatcatcttttgtatcatacttgcatcattccaaatgttgctaaagttattaacaatgttttgcatttggtcttaagaatgcataaacatttaaagaagtgttaataactttttcaaaattggcaattacatttgatcttttattttgcatatgtatactttcaatattgatatcaaatatatgctaatgcaaaagagtacaaatatgtttggttaacatcatcccgttgcatacatcaactatattacaactagtagaggtgaactactccacaatagaaaaagtgtcttaaaaaagttttatgcatacttgtatggttctttaatattgttgaagggcaatcatgttatggtcacttcattattgaagtgaaaaaacttgattagtcatattgtttaataaactcagaagctttaaatatatgatttcaaggttatttattacttggggaatctgatgttaacaccttttatttaagcttctcttgcttctttactctctttttatattcttgataagcttattttttttgagcattaatggattttttaaatgagaatatagtgtcattagtaattattgtgtttgatatttaatgtttataacatgtaaaaactaaatttaccttcttttgacaagattcatgagactttaaaggttaagttatgcatttaaaggttacatgataagtttgagaatcttgcatcacttgaatgacttgccattagcacttatattttcacttttgctttgaagataacctttactttgtttttgatgaccatttatggcttatggtgcctttgatttttattctatgttttctttatatttaacatgactctttgattctagatagatatatggaacattgttatatgaataaaaaatatacatatatcataaggtacagaattccattagtgtttcattatataaacttttatatggttatgatccaatattgccaatagaattgaatttactttgcaattgccataaactatcaatgttaggttttggaattaatattttatgagcattcttccattgatttgagtcaagtgtgctaaacacttagattatacataagtgggacaacaatggtgttataacttgcatcatttaccacttataaagtaaatgtaattttttttttttttataatatataatttgtctaaagggctttttacctagtgaaagagacaatattgattattatagcaagctgaattgcaaatttataaagttcaacacaatatttatccaatgttcctctagattctaacctatcaataagagcaccttaattatctttcatccttttgagagagggggatgattgtgaggtccagatatatgactataatgctatatactattattaatataatgggatagcttagataatatagaataatttgaaatattaattattaaaacacataaaatctataattcagaattttccaaaaataatagtgggagactttgatattaaagatgaatcagaaggattaataatttgctgcacattgtgtgcagcaatgcttggtttgcttaatagtactgttattattttttattattctaactaatcaaatgacattttataattataaaaatgtttataatgtataaatacaaaattaatcttatttaatattaaatattagattagaatatactaggaagtgtttagaaaaatttataaattataaatataaaattataacaaccatgagatggtaaaatattctagaatatttgaatatattttaaatacattcactactaactctcatgcatttgtgaaaaccctaagttttggttatgaaggtcctatgctctctagaaacagcgtgccaacattaagggactcctcacgtcatctggagatcaatcctgaaaatcttctagtgggcgccaatgtggaggaagaaaggctcgatctcttctacgtggacagtgtgaagagacagaaattcgctttctggggtggaggtggtggtggagcagtgatggccgccagtggcaagaaagaagaaaaagagatctaagttttgccttttatttcttgtgtttggaactctcgaggttttacggtttcaaatgagggtttggattcagcatagcgaccgcccggcgttacagttcgaggtcggcgcagatggtttgatcgatgtagcggccgtttgcaagcagttcctcctcgatccgaatgcaaatctccacgtttcaggagtggccatcgagatgattgctgctaaggcaagtagaactctagattctatcttgggggcggccactgaaggtggggatggcacaactaaagacaatgccttgatcataagggaggaccgttatctttggtttcgacaccagaaaccggtatttctcttgttttctgaagttttttgtgctcatacgtgatgtccaggatggttcgaccgacacagttggattattctcggacggtctttttgacttgcaagacctttgtagcacattcggtctcgacccctcaagcgctgtacgtgttgctggccttcgtctaaagtttacggacaaaggaaggagtctacacactgtccggaaggttcaaggtgttggaggcatcgaggatggctcgtcgcgagatactgcgtttactgttgaaggctcgcctgctacgactcgtaagttatttctttcttttttcttttcgttcttttatcataggaaactaaacaactcccatggtttgcagccggcctggcccttattcctgacaaattcaaagcagtctgtagtgtatcaagcccgagcgccgaagttgccacgctggaggggattgaaagaactctggacaacaagcttttcaaggatatgagagcggaacgtggtatgccgattggactcggtgccagagcattcggaatcttcatcgacactttcaattccatggcgcctcttgaggcaggacttctggctgcagcgcgtgaccttcgtgaccgtatgaagaagttttatcggacggaagcacttcggcggcaagaattcgcgaagttcctcgaatcgtatctggacgacgataagtacgtggtggttgctaaccgggatgcagtaaagttaaagatcgggaagcgatctcgggatgacagcagcgtgaggaggactcctgatgtacaggtgaaagccaggatactgggtatactggtggttcttctcacctgcgaggtgaaaccggagatgggtttcaatggcgagccgctcttggaggccctcttttattatgggactgatgctgcagagagcgttgttgttagtcggcaccactacacaggctgtccagagctgattgtcgagcttgttggccccaacattcgcgttggcggggccatatatcacgacaaggccatttatcagcccttgaccgactttctatccctgcttgatttcgaggatgatgctcacctgttcaaggtaagtttgatactggatggaagcttacattcagtgctcgttttcgttgcagttgatgcggtttcttcatgccactcgacaagctttgaaagaactcgtgaaggtgtacactagcgctcttacactaactggagtgcctgttcgagtagataccctgcactggccgtatgcgcttcgagaaaagtatccagatgctgctgcggtccatcagataaaaaacactcttgtttacatggttacgactggcagtggacagcgaagggtggtgaagtttgtcaggcagtatggggaggatgctcatgcgcagtgggagcaagctggatatgcaccgcaccatacgattgagcaactcccaggcggttggaaaatggtggatatggactgcctcacggcagcgtatggctggcgatcggtgttggagctccgtggcatggaggagacgacgtctgatacttggaagaccatgcaggatgcagtttggcgggcactactgcagctacaagctttgcaacctacgatggtgcatggtgatctgaggttaaacaacatcatgtacaacgtccaaacggggcagccttgtttcctcgatttcgattgggcaggacaggatgagatggttcactacccactgaacttgagctctaacattgcctggccagctggagcgacgcccatgagcaacatcaaggcgatccacgaccgtgaactccttcaaaaggagcttgaaatgatctcgacatgaagcatgtaaggggtgcagatattgggaccaccaggacgtcccctagcaaggataccaaattgtcttgtcagaagcaattaagttctaagtaatggaataatttgctgtgtttaagtaatatttcccaagttgttagatatttaaatttgctatgcttttagtaagtattttgtgtagttgtatcaaagcaattgcacccatgtatcttgctattagaaatttatagctctagatcctgtcaagacaggttctaaagctgttatgacatgatttttaattaaacttcctattcaataacaacaagttgaataatattatagtggcattaggtgttattggccttgagggacgagcatatacttttattttgcactggtaaacaaccaagatctaaagtccataaggtcacttcaacattaagccatgttaatttgacatatagattttagatttataactaatactaaaagtttgagtataaatcccttttcaagaactattattctttttataatttcttcttgtgtagccatttaatctttcaatatgcaagggccacaacataaaaggctgtccatagaaatgctatagaagactgctagtgacaattattacttatggcttaacataaaggtaaacttaacgtaaggtattctttctaggaggtcttaatttagaaatttaaacaacagtttatattattaaaccttgattttaacagcaaagcatctacaatatgaatagaggtacattgatgttaaaactcttaccatctaatatatagagccaaatcaaagtatttaatatatataatgtttctttcctcagctttatcctgttacatatacaataattttagcaagggacaatttagaaaaatcctctctctttcttgtttggattagtgttgcatgagtctagtgtccagaggctttgatcacgctttgctttctcatttttcgagttagttttgattctttgactccatatgagtgataacaaaaagttctgtacctagcttcccattgatttagtttgcaaatatgatgttttctttggatggtatgcagctaagagaaatgaaaagtggctggcttactaatattaattaaaaactagtagtaaacatttaaatatttaggattttataaatgcttaagccaaagaaactagtaactcactttagaattacactaacaaactaatccttacattgaagatgccttcctcttcacagtgaggaagggagggaagggagggcggggcatgatgatagctgtggggatccatgcctattgttgtctggtagatagcatacttgatggctcccactgttcttgctagcagccattgctcaaaagcctatgccatccaccagctataatcgtctattggactcttgagcacctcgagatcaaggccaagctttgctgtccatttcttgagctcagatcaccaacctccatttcgctcgtatacatcaggctgatggagtcatcgatagcttaaatcaagagctttcgtttgcagctgccgctgggtcttcacttaattgatcatccgtttccacacaaggagctccaagggccataattcagactcgaacagatgataggatatgacacatctcctgtatgaagctccatgcggataaagtggtattggagctcctccacttgatcccagagagcatccatcattcctagacaagatgaccgtggagagttcagctatgaaaagttgtcgcttggcacttcagtgggtgacaagtgcattggaacaatctgagtggaatgcaaagtatgcaccacgtgccgccgtaatgcaatctatgatccccacctttcgtggattgttcttgtggataatatatctgaggtacttgtaatggtctactttctgaagtgcaatcccatggtaggagcataccctggcccaacaccattgacttccatgcatgtggcctcacacaattcgctgcatttggcgagctgaggagccgaacagagtatatcatttacgtaaagcagtgcatataaatacattcccgagagttggtatggcgtgagtgttttgccctgtatcatggactctagtgcgtcaatgtagattgcgaagagtcagccgtatgcttttctttaacgtccgttgccaaaagacgattacggctacgcatgaaatggcggtttctagcacaagcacttttggcatagcagcggcgcaaatgcaaaacagtctcaggcattgcaaagtcccctctcgccatggcgttgcttgctactacaaacccacatgggccttatggatggtaatctgctcacttagaggagatttcaatgccaggatagcccgcccaagtggaatgtgtcctttctccaccagatgcccagtgccgtgagttatgtgcttaacagctcaggcagcaaactgagatccaaaagctagaggttacacatgtgagacctgggccttgcaagatgggggcctgagcattgtatattacttgctgctgcggcgtgctaaaatcaactgagtccccaagtcaaaccatgtgcaaattccctccactgcacagcgctgagttcacaggtccctgctacagcacctttagctgggataagagtgttgttgacactttcagagggaaattgcgtctatctttgcattcaggtggaagctaaaccctaatagtaataattaggtattattattatatgcgatggttgtagcggggatgataagcataaaagaaatacgcttatcaaaaagtatattctcattcaagcaagatcttgatttgtttcttaaatttacatttgaaacattacatttgaacgttactagggttctcacacatatcatggggatcccggcgcgaggggatggcggcgagcagcggaggtatttcagagaaacgccggatgtgagcgtcacgccggtggatttcctgtgctccacgaaggagagcgatctcttcctggcgtggaatgtgaccaagatccagggatggtggaaatctagggcctgcgctagagaattcgctgccatggtttctcctttctccgctctcttgagatttccttcgtttcccttttggtatttcagctttttctctctttttttttttttgttttgttttggcagaaagaagctgcgcgtttgctgcaagcggcctggaggaagcaccaaaatgccaggagaatacgaagaaaacggggccgatctagaaattcactgcacgctgctgcatggacgatccaacgctgctggcattcttacgcggtgagtttttcttctattagtttttctttttgaagtcttgtttctctccttacagaacaagaagatttttagatactacaaagatctcat

SEQ ID NO: 14842 - DNA, 10029 bp, Selaginella moellendorffii
  Intron number 1 from transcript 134581 (locus 134581) deri ved from phytozome v7.0 (chr-ID scaffold_127; pos 231446 t o 241474 reverse strand)
gagcaccgcacggtagccacgtggacgatcgcgatccaggggcacgcgcagtacggccgcggatccgacgccctggatctcttcctggagatgctgctcgagggcgtgggcattgacgggcagacgatgatgggcgtgctggcggcgtgcgcgcatctagggctcctcgatccggcgagggattacctcgtgtccatggcgggcgatcacggcgtggcctgcgatccgggccactacgggtgcatggtgagcgtgctgtgcaaggccgggcgcctcgatctggcggaggaattgctcgacacgatgccggtgatcgcagatgtggtcgcctggacggcgtttctggatgcgtgcaagatgtttggggaggcggatcgaggcgccagagcggcgggggagatcacgctgctcaatcccatgatgtcctcggcgtatgccatgttctccgagctcgcattgagcgagcaggatgaggacctcgactcgtggcgggcatccagtcgtgagatttgttgttcttgagaggagctgccatcgtcgcagcgcgagaaactctcgaggtacatttgagcaagagtgagggagagaatcatttgccgaatattcctactatgaaaaattattccaacgaagaacctgaggagttaaggaaacaagaagaagctctactgaaagaagctcgacaagaagaagagagggtgaagctcgaggaagcaagtacgtggttccggtttgtattgactcagacttttttctttttccccgtgaaacgtttaagtggtttttgtaggaggtggaagcataagactgatgatatggaggctgccagattgcgaaaactacgagcccgagcggctctgtcatcaatgatccttggcttgccgatccaacacggacgaaagtacgttactcgacttacaaagcaaggactcgccaaagaagacttaaaaacgcatcgagtctcgcctctcaacagcatgtgggagttcttggacgtgccggaaatagtttctccggttctcagagctaagaatccacgggcgagaactatttactggaaactggttttccgcatgggagacaattcgtccaagggacgaggcagtgagcttccggcgcagtggctgaggtcgaagctgatcagaaatctggaagggaacacagtagcatgctacgtctcgagcaacgtcgaaaacgtgccattgcgagattggtctcgacagaagcttccagccaagtatcaacggggcaagcgctctcttgttggttgacgaaggctcgcctctaagtaggatgcgcagcaagctacattcgctggtggaatctcttccaaccgggacgtctgtgccgctgttggtattttcaagtggctttggatcagacgaaggcgatctgaacagaaggccgccaccagaagaagagttggcactgctgcttcagctacacagattggacggcgacaagatcagtagctggataattttatcgatcactgggaaaagtgaacacgggttctactgcagtgagactctagccaggggtattgagtggctcgcgactttagcgccggctcagctgtggatctccgcgacttggtggcagaaaagctctactctacgttaaactcgtcacgggaagaaaccaaagccggtcccggagactacgttttcagcaaagcgctccacgacgctacagcggaggtgacaaatgctgtcagtacgagtcccagtcactggcctcctcgatctcgtcggaagcttggtataaggatcaggacactcctcccgcaggctggaacagctttgcgacttagcacccaattttctacgcgctggagctctgccgactgcctccctttcctcgtcttgacgaacgaaccacgtttgctctggctctctcaccattgtcggcggcggctccccgactgcgtgagagctcaatacatgtctctactggaagtgtacctgagcaagctcggctacgaagaaccggaggctaaccgtgtcgcagccagcattttggatggagcagtgagcctcgagtggtcggaaggtggccgcgcgggcgtcgggtgttccggagcattttctggacgcgtcccaacagcgagcctggtaggggactacaaaaagagtctcgcgtttgcttctcggctccaaggtggcaacgtccccgagtcgatccaggtgagttttgtggagagatacaaccagcagtacaccaaggaggccgagactgcctgtgatactgcaacttcaaagccagaggacgttatgctcaggcacgagctcaagtagcggagatgagctcgagctacttccgaaggacaggggcagtgctacctcagacggagccagaggcacgactggacgagctagtggcaaggctggacaaaaggctgaatgaaaacactcaggcagcagcgactggactggaagaaattcctcggccgtggacagaggacacgaagctgctcgtgctcacgccagaggggatcgacttggaagttttggaagtgacgagcccgaggtcttcaagctcggacagctacaagaggtttaacgagctcttgagtagctgccacagcgcccagacgctcgtctctggcaagctactgtggtgttttttataactacttgacaaatgtttgtaaatgtattcatttcttttcaaggaaaccacagggtagctttctgtagatcgtctcgttttgccactgccaaagcgtacacttccatctacccatcgttatggaacgttgttctatgtcaccgttgcaatctcatggtgttgcaaaaacaaaagttagagaaaccataaagaaaactaaagagaacatagacctggggttgaagcctctcaattcgttgaacaagcattttggttagaacaagcacctgtcaaacttcgacttccatatccttgaacagccggagttttcatgatcgttgttttcattgaggttggaccattgtcatgtaagttctgaagtcgcagatgtccaacgttgtttctcagctcgcaggtcttgcgttgagcgcattgctgacaatctgtccaaatgttgacatagaatctctccaatctcgtagcatttttcttcttagacacagcgttttttagttctcgtggttgagcagcaccaacatgtcacttgtctttttcatgacaagaaattagaacaaattgaaacacacacaaacctgacaacatgaagctaagtatgtcaactttcaatgatcgttaatttgttcgtattcacaagtttcccttcccgttgaaagtttcttggaccgttgttttgcgcttagcttgtttaagttgtttgagcatatcatcttagcttgactgtgtcactggctcccttttgcgttgagcataccccgtcgacaatctgaatcgaaaagaaagagcgtcttcaaacgttgagagtttcaacaaattcttgattgcttctagcccctcttttatcgttgatcattctagagcatatttcttgtctccagcaaatctctcttgtttcgttgtcttactcgcttattaaacgaacttaccttgtgaggcgagagtggacttgatccgtcgctgatccttgaccggccctgatcgttgttttcattgaggttggaccattgtcaggtagaacttcagctggatttaagttctgaagatcgcagtttcccaacgttgtttctcagcttgcaggtcttgcgttgaacgcagcaacaaagcgctgacaatctctccaaaacgttgacacaaaatctctccaatctagtagcatttctcttcttggcacacgctgtaacatggcgtttttcagttcttatcgtcgttgagcagcacccttcatgacaagaaattagaacaaatcgaaacacacgcaaacctggcaacgtgaaactaagtatcgttgatcgtcagttttgttcgtattcacacggcgttgtccacatcggtgagtttcccttcgcgttgagagttccttggcccgttgtcttgcactttgcttgtttgagttgtttgagcatatcatcttagcttgactgtgtcactggctcccttttgcgttgagcataccccgtcgacaatctcaatcgaaaagaaagagcgtcttcaaacgttgagagtttcaaaaaattcttgattgcttctagcctctcttttatcgttgatcattctagagcatatttcttgtctccagcaaatctctcgtttcgttgtcttactcgcttattgctaacacaaagaaaactgaacgaacttaccctgcgaggtggagaggtgcgagtggaccgggcctgtcaaggatcagcgacggatcatgatcgttgttttcattgaggttggaccattgtcatgtacattttcagctggattgaagttctgagatcgccgttgtttctcagctcgcaggtcttgcgttgaacgcagcaacaacacaactcaaagcgctgacaatctctccaaaacgttgacacaaaatctctccaatctagtagcagttttcttcttggcacacgctgtgacatggcgtttttcagttcctattgtcgttgggcagcaccagcatgtcacttggcttctcaatgacaagaaattagaacaaatcgaaacacacgcgaacctggcaacgtaaaaccaagtatcgttggtcgttagttttgttcgtactcaaacagcgttgtccacgtcggtgagtgtcccttcgcgttgagagttccttcaagcgttgcgagtttcaacacgatttcttgatcgcctctagcatacctcttagctcgttgcaagcagcttcgctttccaaatctgtcttactcctaacgcaaagaaaagccctacctaaacgaacttaccttgcgagggtagccgttgttcacgagctgccgctgtggcgcccagtagggcgacgtctcggtgaggggagagaggcgaagcggcctacctggagctccgatcaatgggcagagtggaagggtcgcgaaaccccaagacgcggcatccatcactgctctagccctttatcaccgatgagccctaaacttgagctaagtaccaccgttttatatagacagggcaaaaagggggagttctcaattagtgcaaaacgaagaatcttacgagctacttaattactcgaggaatcctgctgaggctcttccgtgctgctgttgccagcacgggaagcttctggatctcagccggcgacaggatccgtatgcatcgcaccgtcgtgttaaacaaacacaacatgaaatgcgtctctgacgagcagcatgtcgccttcattatctacgtacacacgttcaggttctcgtcaatgccgaacagatgctgcagctcctccaggagttgcgtgttgcatgtataatccccaaaacttggacaagtccaaagctcgtcccactgcaccctgtttgtgaacttttgaaaagtagaagattcagagtctggcgcttcaaataaagaatgagatcttactttggtgcacgtcctgcttggttgctgttgttgctgctgctggttccagttctggccagtaaaacacttcctgaagccggaagtttccaactcgagatccttgtggacgtcgtctttggcggtgctggccaaagctgtctttggtttcaacgagacgagaaaccaaatagtttgcacttgcggtgggaatcgtttgcattacctctcgcaagaggctcctcacctcctgaaagaacaaaaaagagttaaaaaaaagcattacatagcaagtgacgacggatttcacgtactgtgggccattaagaaaagagttgtctgttgtatgttgaggctgcaagtagactgggcaacttaatgctgcttgccgagaagcgaagctgctggttggagaaggctgctgcggtttctcgaattgtggaggaaacttctgctctcgaaactgctgaacacaaagcctaagctgctgctggtgcatatcgactttacgatgagatggtagcccctcgtttccgggctttagcaatccagaaggaaaaccaggaacactatgaccctcagtaactcttggagttatcttagcctcagaatagagagctgtagggaaatttttcccttggcctcacattggaagcaataaatggctctatctcctgtcttttgctagccgcgtgcttgtcccaaccgacctatatagaagacaagactctttacctttaggaagcgccatttagagccatcaattccagtaatagttcccatatatctgactgttagcaaaaggagacaaaacaagagattcacctcaaaacgatttaccttctttccgacgaatcctcagtctcaaatctcattttgaagcgcataccaataaaaaatttcatcttgaaagatttcacgtacttgtggtatggaacaacaaattcagctggactagcacaaattcaccactttgccgtgttaaatccaaagaatgtcaaacgaggattgtagaacacggtgaacatggtcttagtgggtacagcatgagcagcagcagccaggactctgatttgcatactgtggctagacagtagcgaagacgaagtgaaactgctctgcgtgcgcacagcacacccaataccgattctcaactcaccatgatctcccctacgtgctacgtaatattattacggtatgcaaaacagatcaaaaggcttgaaaattttataatgaccaacagtatcggcttcttctggcttacaaacacactccaccctgtcgtcgaaagatgccttcgtggttgtcctggataagagcagaattttgtaagaaagtataggtgggacttccattcaagatcttttgctgtaatctcctttgctggaggggtttgctgataatcctgaaatcgagtttaacaaatatattgagtgacatatatcaggatatatgagcctcggtttagagaagctcctcggtttactgctcagagtccagaacactacaaacggatatgacaaagtacgtttcattcaacgctatgcaagaagctccaacggaaatggtggaagaagaaatgcccgactatgacgacggacaaacagtctttatcgatggtagtcgagacaccggttgctccatcttacatctttcggactggatcgtttgattggttacgggcgcttaattttagccagccagccgagaagcacactctgctgccaagtacgcaagacagcatggtagctgagaaaacgtccacagggaaaaaaactcgttcagacaattatgaggagcaggaccactctccaaaaagacaggagattactagtcctggagagatttagctgaggagttagaaaggaaagaagaagaagctcgacaagaagaagcaaggatgaagtttgcggtttgtattgactcagattttttctttttcgttgtgaaacttttaaagtggtttttgtaggcatactgtgagattgtagtaatacctattgtattacaattggtatattactctaaaaattggtgcacacaataaaaaattaaatttaatagtaaaacatgaaaaatttggtccctgataacaaaaagttaactctatcacaatttcaaatggttttaccttttagtgacaacataaattgtaaataatgtcctattgtctagatgctccagtttcaaacgaacagagcattgtttgttatttggttagtgcatttgttcagattctgagcacagcattttacagttgacaccatttgcacggatacaccaactatcacctctagagtctttgtcataatgttaattatgaacctttgacataatgttaattattttagtagtcttaactcatccttgtcttccctctcttcaactccactgagactggggcctatgctttctttttattttcactcttgcagtagagattgaaggtcactcaaagattgttcagagtgaattttacttcactcttctttatccaaaataaaatgctactcttttttattgcacaaagaaaacataaacccggttcttcaggtcgctgtcccaacatgcttctctacgtgtaatctcttcgcgtttcggaatgcccggcatgccacaacgtacaccaagacgagtactgccacaactacgatgttgacgatcgccgctgtcttccagtcccctcggatatcctgctccaccacgcccgccttgcaagaatcgcaatcgaagcacaggcgcgtaggatcgttgctccacctcgcgcagtcgggattactaccgctgctcctcccgcgggatggcggatcccaggacgtcgcattgcggaagacgagatcacattctagagggggcttacagcagccagactgatttggaggaaagaaagattttagaggtaacatttcgatcgcaaggaccagggaaagagagagcatgtacctccacaggagacagccgcgcggcatcgaagctctggattgttgggtacgccatcgccagatcccggcaaacgtccaaatccttcaagcatccctcgatcttcctccattgcttcgcgccaccgacgcgtttcctgagccagggcgagtaatccccgagactgtactcccggaatcccttgccgggaagggcgcggccatggcgcgtgccactgctcacgaccatggtgaagatggtgtcggcgagcagcagtaggatgaggatggagagaaggaagagatagatccagagcagccatgggaccttgaagcagccgccaatgaatccggcgatggagaggaggaggaggaggatcccgatggcgagcaccgaccactggagggattggacgcagtggctattggcggaggcgaggagccaaatcccagtggcgatcactgggagggagagcaagagcgtgaaaacactgatgatcgcagtaatgtagttgctagcacccattccctccttatcttttaactaaagaaacaaccccctttagggttcaagataatggtaaaataatctaaatcttttaactaaaggaacaatcccctttagggttcaagataatcgtaaaataatctaaaatggccacgtgttgggcaaagcaaaaaggaaatatctttaagttttaaaataatctaaaaatggtggtgggcaaagcagaaaggaaatatcttttcttgaaaccctaaagagggttagttaaatcttaaaccctaaaccctgaatggtatatgcttttggccaagacatgccagaggaacaaggcgggatggagggcgatcgccattccggcagcggcgccgccatcgccaccatcgccaccgtcatcgccacgcacggtgagtataaacgactacgcatcgctgctatggcaatgccgcggcttggacgaggtgaggaagctccacgcccaaatcgcggcccggaagctggatcgcaacaccttcctggggaatgtccttgtcgatgcttacagcaagcacggcagcctccatggcgcgcagctcgccttcggccgcatcaccctccacaacgcccactcgtggaacatcctcatggccgcgtatgcccagaacgggcatccgcgcggcgccgccacgctcttccactggatgtgctcgcagggcgtccggcccaacgcagtgacgctcagcaccgcgctgctcgcctgcaccgccgccaggaacctcgcgctggggcggaagctcaacgagctgatcgcgagcgaggcgctggagattgactcccacgtcgagagcagcctcatcaccatgtatggccggtgccgcgagatcgaggaggccgagcgggcgtttgatcgcagcccagagaaggacgtggtctgctggaccgcgatgatctccgcctatgcccacaactggaggacgtcgcgggcgctcgagctcgtctggaggatggatctggaaggcatcaagctcggcttgccgacgtacgtgagcctcctggacgcctgtgccagcaccatggatctccgctccggcgtggccttccaccagagagccgctgctatcggactggaccgctccagcaccgtcgtcgctggcacgctcgtcaacctgt

SEQ ID NO: 14843 - DNA, 22576 bp, Selaginella moellendorffii
  Intron number 1 from transcript 40326 (locus 40326) derive d from phytozome v7.0 (chr-ID scaffold_79; pos 607821 to 6 30396)
ctctcaggcctggagctataggctggacatccttcgttggagcttgcatcacacactcggatggcattagctccggagtcagggagtggagaatattttggagacgactcactccaaaagtctggggaagcacttgccttgcgtgatgctggtgaacgttttgaaggaaacaccaacatatgctataggtagaaggctttttgcttaattctttttgttctttggcagggatggattacggttcttcttcagaagacattcgaggcgctctccctgagtttttgactcaaccttcttcctttcaccactgttacggtgaataggatctgctttttacaattgatcttgaaagtccagccctccattttatatcttaatactgagaaaagaaaaaaattaatattatacaaaaaaaataacatttataaatcaaatacctcgtcgtcacaaaatgatacgaaaggccactcttgcacattctaacatatggaacccaacttgtggaccccagcttgtaataataaaataccatgtgtatattttgaaatataaatgcattccaaatccatcaaagatcagcactgaataaataaaaagcaataaaacacataaaacatatctcttaaagtcgcaatataacatacatagtatatgttttatttcgttaaagtgggacttttcattatcccacttatggtgtgtggccacatgccatttttataacaacaataaaaaattgaagttttaactttataatttataaattaaaaacttttcatatgattttgtgttataatattgtgaaatataaaaaaataaattaaaaaactgatagaaatattaataaatattaattaagtactaggaaatggcatgtggacacatgctaattaatgtcccactttactgaataagtcccactttaacgaaataaagcatgtatcctagaatcaaggctatagttatgtttgcccgtcgaatagcggcgctcatggcatctttctgggcgccacgggatgatggtgagtggggacccaggtctttgaatcatccatctcctctatcctatttgctactttaaccgctgaacctttagccgatggaaacagctccagctttggatcagagacaatctcctcgttcacagaggcaatgacacagacgattgcacattagcatggagcccgtgtgatggagaacgtctcatgatcccgaagcagttaattggaagccatggcctacgcttggccccttcctgccacgaaatgggtccattctctctctgctgctcgacagatatgttgcggacatagcaatccacggttgctttctctgcgtctcctccaccgggagctggcagcctctgttagatgttgaaggggaagaagacgtcgaacttgagttaatggatgctcaaatacgtacatctacaactccatacaagggcttcccggcagcgccagataatgttcgttctatgggtccccactggcacgagggcagcttctacatgatgtcttgcataccttttgaagagtttgtcttcaaaaggtcttcagctggcagggtggtgaagaagggtggcaaaaggttgctgcacatcccatataccaggatggggttgacagattaggtagtgacttgttttggtttatggcaggtggctgcatatatcaggggaatataagcgatctggatgaagactctggtcgctttggagaggcagtggcactaccacaccatgcatgctgattctgaatttggtatttgttgttgtgtgcaacctcactccagagcttggtgatttggatgctaccaccttcaatgcagtgtgggctcaagatcatttacttctgcagctaccgcccattcttctgcatgacttttgatgcaatagcatgttaacaaaagatggactagtacatggagtaatggaggatataacccagatatattccatatatcttttagctgttgaaagatattctaaggtcttttatgagttccttggcatgtaacacccctctcttgcgactgagcccagatttcgaaatacattgactaaagtttgtgaaaaaaaaacccagcgaaacaatatcaaaaacaaaatgcagtgaaagaatgttaaagaacaaacaataggggatgaaggctttgattaagggtttgaagggactgtaagcaagaaattttctcactgcattgtgaaatatttttgcacccactacggggtgatgttgcaggggggattacatcagaaacacgttttcagaaacacatttgttaataaattgatcagaaaatcaaaatgcaacatacatgacagcaacacatgataacaacgaaagtcataaaaacttacaagcaggggccaaagctgaaacctggtatcacttttgccacgtggctagaggctagggttggatatgatactgtcagatctgtgggatccaacggtcagatctggccgtgggatcccacagagatccccaacctccaatggagccacatcatcctggaacttcaagatcaaatggggaaaatgaactaacactaagttatccattttgtattttgcatatggataataatgggagttgtagtgccattgttgtcccacttgtacacaacttaaatgtttaatagacttcgcttggacaagtgaaaaaatgcttgccaaatattaatcctacagcctagcatcaatagctcatggcaatcacaaaagtaaacccagctccattgataatattagatcatgaccatataagagtttatatagtgaagtatcaataaaactctgcacccctgtgacatatgtatattgaagagacagcaaataaccattccaatccaaatgctaaaagttcacgtactttgtgatcattcctttaaatgtccaaacgaaccattccaccaaatcgtttgactatggatgataagtacttgtgaaagtgtggcatatcctcaatcgagacatcaaaacataaaatgcttcaaccataaatacaggactattatttgaaaaaatctgctccggacaaaatgctagaataccacttgattgaggaggaagtatccaataatagttgcaaaggcactagcaaaagcactaacttgcacccaatgagtcaaataattataagtaataataacatattcattgccagtagtcaatcgtggaaaaagtctcataaaatcaaataccaccaactcaaatgaatggaaaattgcaattgactccaactgtccttccgcagcacgagggggagtattacaagcttggcactaaacatagctacacacatattagataatatcacatcacatcttcggccaatagaaagaccatctttgcatagcttctcagtcacataaagatgtctcatatgcccgcctaaaataggagaatcatggtaggcatagagaaatcgtagaataaagacagaaggcaccattagctataattgatcattaggatccattcccataaaataaagaaggttgttttcaaggcgatattgaaaatataaatgccagaatggcaaattatcaataattgatgcaagattctcaaacccatctcaaagcctttaaatccatggctcaatcttttaagcatcgcaaacctcattaagagaaggtacttactctacacattgtggacattaaatatcaagtacaataactgccaatagcatagaatcatcgtctagaaaatccacaaatgctagaataacaaggtcatcagaaacataataatagagtgaagaaagaagaagaactctaaaaagggtattagcatcatgatgggatcgataaacaatcctctacctgcaaatcaaaaatcacattagaagaagtgcccaagttgaaattgatatactcacaatcctgtatccatgttgtacgatcaaagatgtatggcatgctatcctcgagaaccagctgaaagaaaaggtacatgcttagaacaataaggcaaaggaagaacgagaaaacaacacttacattggccaagtagatgatcatttcactgagccaactgctggtcacaaccttctcggggagaggattagcaacttggaactgtccctgcttcgccagctccatgatttctgcaagctcgcttgcttgcaagagtgtggcattgtcgtcccactgtgagttcgcgcacagagtcacaaaccggccactgaaatcttccccgaacactttggccgcgaaacgctggtgctcgtcttcacaagagttgcttgaaccgagtgtggacttgacgtgctccacgaaattgttgccggcgaatttgcacagctccttgagctcgtcgtgatcatgctgccctaaaccgtcaacacatgacgctgttattaacctctagtcgccgtaaggaaggggtttacttggctgagactgtgacaaagaagatctgccaagagcttggagcgtggattcactccccaaagacagtaaaaaaggtagaagctagtgtgaaagacatagataatgccctgaggatgttatgttgcgcgctgctgggggtgaatttagtgacaagcacgaaactttgctggctaagatggccaagctacttagattaggaaacatggacggtatgtatggactcgccagagcttacgttctacacggcatgcctcgaaaaagtggcggtgatggccattccaactctaaaaaatctagtagcagggtacgatggaattctcaaatatacttcaatcccctcaagcgccgggagatgacagaaaagcaatgtttagagtttcaacagagaaagcggtgttgcattgccacaaaatgatctaaaattttgacaatggttttcaaaatcacggacccatcgtttcttctccaacgcatgggaatgtatttaccccacaaggcagaaagaacagaatggccgggagaggatagatcccttcgacgacgaggcatgcctccaagcaccacgctccgtctccgcagcttccaggagcctcgaccatcgacgagctccagcagtggtattcgaggtcatgggcgacagttttggactttccaccactggcaattctccctgaagtgcaagttgactagcgccgaggtgagatcatgactggatagataaagagagatggatcagtctctggatcagatagataaagatagattggatagttttctgattgacctagatgagtttctagatcagatagaattcatagtggatggttttctcttgaccatctcattgcgattttttaataaagtgtaaattaagaagattcaatcgctaagttcagaatcataagggcttaaatgactgtaaaggtgtaaacacactaaaattcatatttttgaaaaaccttttcagagaaatccataaataccaaaaaacttatttatataataataatttgctacgtgcatgtagtaaacaaaaccaagtgttgctaattcaattgatcaaataaagtttataactataagcatgcttgtaatttataaacacaggattaatcttattgtatatcaactattagatggtagaataaaaatgaatatactagaaagggtttaagaaagtttataaattatgaacatgttcataaattataagtataaaattaatctaaataactaacaaccattagatggtagaatatcctagaatatccaagcatattcttgatatattcactattattccagtccctctacaggtttgcttaagcaaaccaaaaaattcattatacttttctagttctaagtaaacactttataagaatttatgcaagagtatagtttaataaatggtgtaattgtaattttgaagaataaaatagatattaaatttcagacattcagaatttagatgtttcaagtaattaaaatgaataacaaaattaagattttatatagctcataaatccattcaaagccattcaaaatatggtctaatatagtttcacagtcacttattcttaaaactatttaaaatgtaatggcataataaaacatctagcatttttcaaactatttaatttactaataaaaaatttattctaccaatatccaaatatttattattattattaaattatcgttttctaatatttatttttattttctttgtttctttattattgaagattataaaattaagataaaagtattaaaaaatattacatggaaaatagataaattggaaactataataatatgtaaaaacaaacttccaatataggtccgaaattagggctaaaaagttgtcttttcagcgttttgcatttgcattagcctctggtgcagctatggaggacatggaaatggagtgtgacagttacactgtgtgctattgcgtggtcaaggcgcaggagcacttagatcccacaatttgggctttgaagagacattcttctgcaactgctgatgatgtagcggttggaaccccgctaggtgatgtggtaacgaagatcaaatgggacaagaatgtctccgatgtttattggttgagggactcacagtggaagagtgttactgacaaggatttagtgttaagtttcccaaagggagtgattgtttatctcaagtttgtgaaaggtgtgggttctgaccttccttgttttggttgttttgtcttgcttgtgtgtttttatgactttcattgttatcatgtgttgttgttatgtatgttcttgcatctttgattttgtgatgtattgttggcttttttaactctcaatttactaacgaacatgtttgtgctgcagtcccccgtgcaacaacacatcaggctgcaggtaagcactctgcatgtccggtagtgggtgcaaaaatatctcgcaatgcaatgagaaaatttcctgcttgaacttttgctattatctggtagcccttaatcaaagcctttgccctgttgttgacatcccatttgttctttaacattctttcactgcattctgagtgattcgtttctgacattgcttctttggtttttctttttacacacttcagtcagcgcgtttccaaatctgggtccagtaaccgagggcttagtcgcaagagaggggcgttacacgcccaggaactcagcagtaaagaagttgttacaactcgttcagcagaaaggtgccgtcctgatacaggctccgcctcagagcggaaagacgtctttcctgcagttggcatatcggaaagcacaatacatgccaaactgggaagctgtttattttatcaatcttgctactgtcaatgacattagcttcaaggagcttctcaagcttacttgtggtaagtgtagcatctgcactttgagttgaattaattccctgtgctacagatgttgaggtggcggatctcctttgccccggtggtccgaaaaggcttcttttagttgatgaagcccaggctgcatttggccgtgacttggtgttatggaaaactctgaagcaagtgcaagggggttaccaggggcaacactcacccaacttgaacataattctttcatcagattatggagcagaagacgtccctggagctatgattcgagtgtggtgggatactttcaacagagatcgaattctcttgaagtaagcttgatctgctcaaggattttatgcatataaattgttttccaggccttcaggtgatcatggtctttctttgcaattcagtgacgaggaggcagtagacctatggctagcatggatgaggtactacagattcccagaccttggtgatgaattacgagattggattatccggctgtccgataagaagccaggagttatgacgggaattttggattggcttgtggacactgggattgggacgaaaaggccgagcacactaagtgagtacttcgtccgcaagctgcagacgaccgatctcactttcatttttgtcaattgtcggagcatacaatcgtaagctgtgctgtttcttgaaggttacaatagtctgacaggctatacaggttctaccgcaaaattgacagtcctggtgcttaccgttccttcctaacgtgcttacttgcgaatatcgaggtatgcattcgcctggtatatcttgatctgtttgatatgtcctctgattttagatgtcgcatgattggctttcgcaagagatgcaagacgctgtccatgagctacttctgtgtggccagcttatgaagaataagcggggaaattactgcttgccttcgaaagtgcacgaacgtttttacttgaggcgcatctacaagggtatactatcggtagcggaggtaggagctatgggaatcaagctcttccttgtcagggttttggagtgcttctcgtcgaaggcgttacgaaacagcttttcacggggtcgacaagatgaggaagataccaccccgtatgagcgccacttggaaatggagttttacaggtatgtgacttggatctgtttcttttctcacattaatgtgttgcagatcagtatgctccttgcttgatccagacatctgcccatgtcccgacatgggacctcgtttcggtgtcaaaggctttgctgattactatttggcacggtttgggtggttttttgaactgatgaggaagggtacagagaccacaagacattctcatcttgagaggtaagtagagttaaaagtgttttccttgttgttttacttgtttacttctttatgttccagattcaggcagaacaaccggtactggcccctgtttactggaccgctcaaggcttatgttatcatcggtatagcgaatgaggtggaatttgtggataacatgccagacgaggatgggacatacgtgtttgctgttacatttgcctccaacttcaaaacagcaacggtttttccggatggtcttactgctcatcttgccaatgatctttagttataggctaaataatatagtcagcttatcacacatgattaaatctcctaagaattccataatgtgaaatctatcaaaaacaaaaaggtgtggactgccacagaacacaccctttgctttgcacataattgagcaatgattgagagttttgactgaaacaatcttcttcataatcttaaaaatttgcaatttgttaatattcagcttatcatagttaaaagattgactactcttcttactcgtcaagagaaaactatccattatgaattctatctttcgatctctctttatctatccagtcatgatttggccgccctcttcaagtgaaaaccctaggtacatttgtttttttctctaattctggatgtggctatatttagcatctttgtttttatatttgtagttttccaagtttgtagatattatgcattccatctattttctaagcaatatacaatgttttttatacgctttgtgaggtccaagtgtacagttataatgccatatactaatattagcatagtgagattttggtatccgtcagattggtttcaatccggaccccttgcttctatatataaactaggatttttaggctaattaatatgcacattttctatattcactttctatattctatacactcacatgagaggcatatttaattgtccctgagaagggcttggatttggtttaaatctagcttttgcattgtttagatctatgtttttccatttcctttcttttattcttttctttcagaattttggtttagatttagtttttgtatcgtctagatctctcttttcttctaattttttttccatttcttttcttttgctctttccttttcgttcatcttcatagcagtttagtaatcttttcttcctttgactctggagtagtagttggtgcaattgcttaatgctatgtgattgcaattgaccaaccaaactcaattgatggcggcattcacaacatgtaatatagctccactcttggtatcaatcctcacgttcggctgaagtcctttcataggaatcctgtgtactattggtttaatcacttcacgatgattactacatatcattcttgggatgatgcttgatgtttgcgtgagtttcccatatgtttccatgggacggtgttgcagtggtacaatggtttgagcacagccacttgtagggattgaagtgttctcccagacgtcttcaaatgcacattcgaacatgctgatgattgtgatgatgccttctaacaaattgtcttcatcaagggtcatctaagtcagtgatgcaatttagtgttcattttcaaaacctcttgctttgtttatggagccaaatatgtcaaagcggatcaagctaagaatgttgtggctagcacttcgtcaagatcttgtcaggcttgtgcatgcacttgcttcaaccacccttaataatgatttgtttggcacaacattatgagatgtcaccttttccactttttgctgcacgttcttcagctccactttctgtgggtgatggtcctattccaatggaggttgatgctgctactgcttgagtctaaggataagggcgaggatgtagtcatggttatgatgtttattgctgggtatgtgatgaaattggtcacacttatcggcattgtcggcgttttctagattggcagccaccatttcctgggtggacaccttggcgtcaacaacgttctgttggtgctattgtagtaaaaggtttggacaccaagatgcatctgaaaaacaaggagtcgcgcaagtagcggagggattttgcataaataaatcagtgaccccttcatctttcttttgagagaatcatcaaggggttcactcgacaccaattcatctagtgtttactttccaaactcgtttttataacaaatgatttcctattattctctccgtgttagttgatacaggtttgagtttatcttttattgctcaatttgttaccacacgttgccatctacacttgcgtcatgtggtgaaactagttttcattctttatggcaacaaccatatatatgcatgtgcacgggatgaagtggacctagttgtgcgtgtcaagcttgggttgcaatttttgccaagttaagcttttgaccttatctttagtatggattggttgtagcgcaatcataccaaatgtgattttggggcttctcccacttgtctcatacttccttatatttcatccattcttctcactttcgtacctctttgtccctttgcttctacctttgtttccattacttatgtccccccactacttcctcctatatttctgtcttgttccactcttcccttttctgatcccaccgacaatctttgtgttgcagtggttgaccggctcatgaaggagtattctaatccctttgaatttgacctatcatctagggccaagattgccacacattatccaattccaactgaggatgctcatccaatcaaggttcttgtttgtcattagtcacaaagaaatcaaaattttatgtgcaaacatcaaggagatgttagagaaagatgttatttggaagtcacagagtccttgggtatatgaactttatcttatgccaaagcttaatgggagtatttatttctatattgactatcgtttgttaaatgaagtgacgattctaaatatgtacactcttcctcagattgctgatatcttggatcgtttggggagaagttgttggttcaccaagctagatcttgtgtaaataaccaaagagaacgactcgagagacaatctataaaggttcaaatatagaaggaaagggcccatgaacaagagtgcaccccttttccaattggttaagggttttggtatagttggggttaagcgtctttgggtttaaataatattaggtgaccttctgggaagtctaaatttaggagttcacatttggtatcaaagaggtctcaggtaggagtttacatttggtatcaaaaaggtcttaagtttgactttgttggttagctaggggaattgcaccacatgttgattgacatttggtaggtccaatttactcctatttggctcgacccgaggggtaagggttcaaatataaaaggaaaaggcccatgaacaagagtgcaccccctttttcaatcgattaagggtcttgggataattggggttaaacatccttgggtttgaatagtactgggatggatgaccttctgagatgtctaaatttaggagcttacatcttgcttctgggtactagcaagtatcgatggctgaagaagatatttctaaaattgtttttcctacattatttggtttgtacgagttcttggtgatgccatttggtttgaacaatgctttagcaactttctgttggtttaaagttaaaatagtccatgtgtgtatttgggtccaaatacatgacttatcttgagtattgtatttcttgtgagggtttgcaagttgatcttgacaaacttgtggctgttctaaagttccttacttcgaaatgtatgaatgatgtgtagtgcttcttaggcaagatgtagtatctcagtcgttttgtggatcatctttctgatcgcactacatcattgcaagtgttgctgaagtcatcatcagattgtgagtgggcgttcattgatctcaaagaaatattgacgactcctccggttttgacatatcctgactacacttgacctttcattttatgtgtggatgcttgtgatattagtcttggaagtgtgctgatgcaagagagcccaagtgtgctttgtcagcactatcccattgcatatataagccgtacattacaaccagtggaggtgaactaatccacaactgagaaggagtcagtaacatcctaccgatatcgtaaacccaagagaccaatccaaagcaaatcacaaagaatatgtggtattgcaaaaagccataagccatcaaaaagaataattaaccatcatgaaagatcattaatcatcccatcaaaaagagatatgtataatcatcgtcaaaaaaggaatccaccatcccgaagaatagcgaatcattttatatcaacaacaatcaagcaaaaccttttaacaaggataatcaactatccgaaatgatagtcaatcatcatcaatgattgttagatgcaaaaagctaacttcaacatcgaagctaatgagccaaaatgccttccttaacaatttctaacaaatgaactataagcatgaaaacttaagaaaccaaaagctcaaagaagtctatagccaagtcttgtttaataatgatcatgagtcttgtatgaactaatttcaatgctaaaaagacaatatggtacaacccacaatatcctcttcaacacattcataaactaaacttcataatgcaaaaactaatgaagagcatgtctacatcaatccaaaagccatactccacaaatgatcactaaacaatcctccatgaatccatctatagcaagacatatctcactttataacaagtacaagaaaaatcatcaatgatcaatatattccaactcaaatccaacaaggattcaaacatttcaatatcgatcactaacttttcgtttcgtaaggctaatatagtccatgactgaatcacttttcaagaaaataccaaagctcaacctctactaaataatttcgtctagaacacaactaactcaacttgccactcagtttatttgaatgtcaatacaattgctaactagcaattgtacaaatgccaataacataaagttatagccaaatcatcaacactatcttcatcaaaactaatgaaatttaatatcaatgctatagaaagacatctcgtttcactcgagtctcaatatcaacaatgtcaacaacagaacatcacttcaatgccatcaacaccataacaaagctaaaagaaagcaagagtgaatcaccacccaaaactttctagcaactaagttaaccaaagtcgaagatactttagtcagtatttgacaccaattcttcaacaatatttagttatagataacacatcatcaaggagtgattcaccacgtccaagactcaatgtaatctaacattacggactaaacgtaaccaaatgacattgttaaaggtagaatcgacatgccaatatggaaaaaccatgtaagtctaatgacatgatcctccgtaacaccatttggtagagtaagcctatcattactaaatcatcatcgagcaaagcaagtgttaacaatccttgacgaagtttacaagcaatcactagtcacaaagcaactaacaatcacttttcaacttgcctttacaaaatccagacactaaactcatatcattgagtcatatactcatccaatatgaatgtaatacctcaagtatgagataaagggtcatgaacaagcataattaaatgaccacttgaatccagcttaactgaaataagctcactaacacgtttagccaatatctctgagcatgccttgaaaaggctagctatgcataatcaacacttagtcgaaactaaagtgatgaccatgagatggactcatatcagtacacaaccttctcatagacaaagttataatacaggtattaacatctcaatctcaaacaactaagttggacattactatcctcagccaaggtgcagggccaccaagaccaaatcaagattagtatgagctcactactctcataaaatctaacgagatacaaggtgcaacctgccaccaagcacaatgctatagaagaaaggcacaagggtcacctttcttagaaaagtgcaacggccacttttttacaccaactctagactctatgcaactcaattgccttagccccaaaagttagtatcccttttgggttacatcatacaaactacttattaagatttaagccaaccgaagttaacttcgaccctttcactagtttgtattggcttacgaaaaatggaaaggtttttgaacaaagtgatcaatagattagccattggaaaagcctaagaaaatttgtggaaaattttccatcctagaaaaagaatgactctcaatccaggaatgcaaactttcaagactcaaccaacttccttttattaacaacttcacataggttcatctcaacacaaattcttatgacccacagtatgtctaagcatcgaacatctttgcccatttttccgacatctaacactaacattcgcaaagtgcaaaatgaacatccaaggcttgattgcaaagaccttatcttcggacattcatattgcactaacactctttttcaaccactttcaagatccaatgtgaaaccaaaacactaatatgaaaaacgatatggaaaattaaactttaaggaaaattcctcatcactcgaacaacaataccatttccactaacacaaatgctagcaatgtcaatgcctcaactatacaccttttccatctaacaatttactccaagtgttaatagatcaattgatgaattatagcaaatgaatgctacaacccttttccaacacttcaatgggcaaacttaaggaaacaaggtaccaacataaacttagcataattggaccatcattgagaacccagttaaggctacttcaatgttactacttgcaagtagactagcttcaccatcaaccatcttgggattgattatcatttaaccaaacaacttcataaacacattactctttatcacattgatatgatataagcatcacaatgatttgatcatcaattgagcaacatcatgagcaatacctatgttattacttcaaaggtttatgtgaatatcatgtattaacttaattcgataaaatgcaacataaatgccacacctcatcgatagagatttacaacacccaacaccactaacttttgttcacaacacagacaagctcatgccactctttttttgaccaaactcaaaactaatccaataccaagctactcaaggagcaatagcaaggttctccaaaaaagaattgagcattgtaacccaagttttctaatagcaagcctagacaaaatagtttagcatttcactgttacccgtcctatgactcaccatttacaagaccataatttccaacatgcacaaggtagggtctcccgattgcataatataaacataagcaatgagtcacatttcattgtgaatcatttctccaagaaaagaaatgatttatgtgtttgatcttttgtccctaatgactctcttttcggtctcatctttgactaaatcttaagcttgttttcgcactgcctttagtccaatccaagaaaagtttatgagagagcatagcaatgattacttgaatcaatagactcatccctacaatctttaattgatccacttttaatcatgcttaggaaggatccactagtgcaactatggactaacctatttgccactcatagcaaacccaaagaaggtttactttcactcatggtacatggaacaactcatagaaccactggtaagctaacattaatcctaccaactcaaaatgtaatcccgagttactaatgtgcctcactcacaagcccaagcgtaaactcgtgtaaaacaaacaacacaatccatccaacttatgagcccaagcgaaagctcatatattccagtccgaaaggtaaccaaagtttatacccaaggaacaattgcgaagcctttgcacccaaacatatacccactcggatcattgttttcatctctgcatatgcaatgagactagttgcccaatctcattagatagtagttgccaagactcattctctgatactaaatgtagtgcacatggttttggccctttatcctatagtgatttaccatagaataatactacgaaatggaacctaaaccctccatatgccacgtgttatatgtgtgagacacaaaatccctaggccccaaagtggagccggaagggcgccacatggtagtggccgaagcgagagccaaacgagcgtaacacgtttggaccaaaagctccgacttgaaaagtcaagagcgggagtggaactcccaacgaagtgctcgaggaacgagcacgaagcgagcaaaaggcgaggctccaaaaagggacccaaaaggaccaacacatgacacgtgggagtgtccgagatggactcgagttggagtccgaagtggagtccgagatggacccgagttggagtccaaagtggagtccgagatggagtccgaagtggagtccgaggtggacccgagatggacccgagttggagtccgaggtggacccgagatggacccgagttggagtccgaagtggagtccgagatggacccgagatggagtccgagatggagtccgaggtggacctgagatggacctgaaatggagtccgagatggagtccgagatggacccgagatggagaccgagatggagtccgagatggacccgagatggacccgagatggagtccgagatggagtccgagatggagtctgagatggagtccaagatggagtccgagatggagtccgagatggagtccgaagtcgagaccgagaccgggaccgagaccgggaccgagaccgagaccgagaccgagatcgggaccgagaccgagactgaggccgaggccgagaccgagcccgagtccggagcctgagagggtgaaagcccaaagcgttcgtctcccagaccctagggggtttggtgagctccaaaagtatagtaggggggaggactgcagtggagccagtttggccaggaaaggccagtttggcccaggaaggccgaacctagtgttgggtgatgagctgcccactgggaagtccaagactagagtaaacacggaccgacaagcggggtagcttggtgaagtgttcaagagccggctctagttcccccgggagatcgactggccgatgctcccagtccaagtgtgggtggcactacctacttggatacctggtgtggctcaacggaacccgctctaagcccatggctagagcacccaagggcagaaggtgaggagagtacccaggtggctcgtgtaaggccacggtgttccgaaatgttgtcccaaaggcccagactgtggaaaggaagaggagcagtcctctggggtagtgaccaaggacacagtcacacagtgaggaagtcctagaggatagtgggacttagtggtcgggccggtgggcctcgatccagtggcaatgttggcgaacacagccaaggacagaaagggacttggtggggaccgaaacagagatattggggaaggctattccccatgtctgtaggcatcctaaggatattaaggagtggatctgggatgatcactcatggatggatgacccagtctttgagggacgggattggaatgtaggtggtgttggaccaccagtatgaccgaggtaaatgggcatggccttagcgtaacgggccgatatgtcggtggtaccttggggtgtcgatcatgggattggacacgtggagcacttggaccaagtgctaaggttgagtggcatggatgccattctcggggctagcaagccccaagtcctgagttgggcttatggaggttgtgaatgagactcctccaagtggtcggaggtgtggttaagtgactgaagtagaatggaaaaattagtcgcttacaatatgccacatgacacatgccatgtgtccaaaggacagtggtgtggaacctgagttttagggccttaggccactgaactaaggaacagtgccaaactcccaagtatgaagctaaggagtaaaagaattagatcatagagcaactcccgagcatatagcccaaagagcgaaaggacagaagcccggagctacttggaatagtcctagagcaaccagcatcctaatgctaggaccagcacgcaaaacggagccagacaaagtttggcactatttcagcataccatcttgccatcgtggcaataaagaaagaatatccgaaaagatagctgataggtaacttttgatacccaaacttatattcgcaacagtttggcaacaatttggggtttcaagaaacttcatgcatatctacatagttcttgaatgttgctaaaaggtgatcatgttgctgttacttcattattgaagtgaaagaacctaattggttatactgctcggtgggctttgaagctttagatatgattttgattttgatgttgttcatcacctagggagttttatggctttgctcgttctcgtccaagtgaacagcaatcaacacactcacgttgtgacaattgtaaatgtttgattgcagatacaatcgaaagttgtggaagatttgtgagtggtcttcaatgaaatgcttgaggcattcatggtcaccatatgataaacataaaacttgcacacctatgaaatgctgaaaagatgagaaagacgtggagccaaacatctggaagtagaaaaccgataacataccacaagtatctggtggacagcactcatgatatcgatgcctctgaactcaacctttggtagaacgtagaaccacagatctttccaattctttccagggatggtggatcaaaactcttgacattctggaagaagaagaagaggagattctcgtttgtaaaaacgagttgtcgagaaattggtcgtagctgcgaggcaaagcccagaaatccggagagaactgttcgtagaagtctgcaaagaaataaagggatcatgaaaaacaaatgcacaagtgtggcaaacttggttccacggccggagcttctggatctggcactttgctgccacgagtagatcattgtcgtttgattcctcatctcgtggtgccactgccacaagttgatcgtcaggctccagtgtttgatatggcacagccacaagatagtcgtcttttccctgctcgtcgagatctggcactgctgcacctcctgtcggatccttgtcctcctctttaggctcgactatccaattgtcaacttctgcctcgtcgtcttcacttttgagccacatcgatcatcggatcatcctcttctatctgtgcgtagtcctcttctaccactgcattgtcgtcttcttcttcttctctcactgcatggtcatctgcttctatcactgcgtgctcatcttcttctcatacttcttccataccttctgaacttgctgtgccgtctcggaggagctcctgcaccgcttcgtcccacgaagtttggatttccactggactcgtcttcttctcttacttcctccatagctagaccaccttccgagcttattgtgtcattttcgttgtctcgggggagctcctgccccccttcagcccacgaaaattggatctccgcttcgaccatcgttggatcgtcgtgtcgagagaactgatgcgcctcctcgaaagcccatggatgccaactcctgtacttatggaaatcgccaaaggagtgtgcgaccatttctaccgcctgagctacacgtaccgcctggtagcacagcagcctgccatataaatcgcccaagctggccgccgtcattgtcacaggagaaacctgggcgttctctggtccatgaaggcttgccatcgaaatagtcgccctcggctggtctggcggagtcccgtggaagcttgccatcgaaatagttgcgtgagatggcgtccgctattccgcttagagagaaatcctgcgttgcctcccacacctggacgttggaatcgctagcgctcaagctggtcggatcatccgttgctactggcccataatctcctgtcgctgcttcgccactgatcgccgcatgggactgaatgctgcggaggagatcaaacccggagcctggactgctagcaccaaaggcttggtcttttgttgcgaccgctggaatgaagtgttttaaatgcggtcaatagtggtcaaaacactttcttattgaatcaacatgcgaggttgtgctcatagcacgggagcgccccaagaaggatggcaaaaatatcgattcattcattgctaatgagttttctttcatccatggcagcgtttgaatggagaaagcccgagagtatggggaaacagattgaagcgtttgctgagaaaatcaacatcacatggtaagctagagggatgcgctacttcgaatgccgatgtccaggacgaattctcggcgactcctgccgaaactccacttcccaagcgcaatctttgaatgagacagtaagttatcaagtttactacatgattatttgatctcttgctcttgtcttgtgttattctttcggccaagcagcatccaacgtgacgatcccgagcctggtccttcaaaagaggaagtgaaactcgacagtgccactcacgaattcgttggaaagcataggtactttctctttgtttttctggatcgtactttaatctcttcttttgctcaggcgactccaggacgatctaacagatgaaacggtggcgttagctcgacacatgagagagtcgacactgctcatgcagacaaagtttgttccaagtcatttccaagaattgttcctgtgttttttcaggattctttcttttccttctgacatgatttgttgctctgtccaggttgtggatgccgctggcgaggctgtagagcgaagcttggcctccgcgaaccatgtgactcgaagagccggcgagctctactcacgaggctttagcactggatcctcatattcatgatcgcagtcatccggatcaattgatgatgatgttctctcttttctagaccgatagtcaaggcatggccaaggtaggaacgaatgcaacggtaacattgcttactcccttcatcaaagttttctcatctttcaagagctcgccctggtcgagcagaatgtgttggcgcttcgtcaagaagaacctccatctcaatgagcctttatccaccctgtgttagtcgctccccgaaaacagggacgagctccccaatggaatcataaaccatagcatgctggtcataattacatggtaatgttctgaccttttaactctaatgatatcctctgagcattgatatcaaattctccatacattcgtgagtggatttccaacagctagagtcgtcgcctcgctgccagcctcgtccagatcctccagcctcccacacacaagccccagcgagcacgccaggagcgtaggaggcatgccaactagaaactttcgtttagagtgtcttctataaaatgaacttgatttattttagagtgtgtagttttgatgtgattcatgacggccaagctggcgtatgcctctcactagcgagcttgcaatcgcaagctcgccctctacactagcagaagaaattcgatgcgtgaccgatgcgaccgacgcggcaacatatgccagcatcctccgcaagtgctgcgtcgagaaatctctcgagcaagcccggctagcgcactccaagctgcgcaagagcgagcaccgggacagtcgattcattcagaacttgctggtggagatgtatggcaagtgtggcaacacccaagatgcgtccttggtcttcgacttggaatgtcatggtttctgccatggccaagaacaagcagcatgcccaagccatcgaagttttccggagaatgctgttcgatggaaccaggccacacaaagtaacgtatctcagtgctcttgatgcttgctcgggcttgagcgttgatattggaagacaaatccacaggcttatcaaggagagtgggaggtgtggcgggatcgacgaagcaaa

SEQ ID NO: 14844 - DNA, 6906 bp, Selaginella moellendorffii
  Intron number 1 from transcript 416300 (locus 416300) deri ved from phytozome v7.0 (chr-ID scaffold_30; pos 330740 to 337645)
aatcaagtcatgtaattatcactgaaaataccagcttttctaaattgaagcttcctcttacctccacaaaacacattcaaatataaggggttccaaatgtatagtagggatagtggttggaatgcatgtccgaccacctgagatattaatttggctctcactgggctatgttgctccttgttctacgttcggcttgggtttaaacccaagctccatgctactctagttgatggagtaccctcctccttgcattaggccaccagcatgcaaaattgtgccaaactccatctgacactattttgtgtgcaagtgttggatatggggagttagtgcttgtgggattgtacttgaccctcgtttcgtagcgcaacaggcttggagtttagctccaaattcaggtgtgctacatttggtatcagagaaattgtttcagtgattcctatccaacttttgtcggattttctgactcatgttgcatatggagagactcttctaggagatccaaagcgacttatgtaggattaattggattgcaccatttggtaagaacgttatatgcatgttcagttactaatagaggcatgcatacaactagtgggatggtgaaaaggaattgtgctgatgatgctgaaacttctaaacgggtgaatcgagaggaggaaactcttgctagagatgttatggaagaggctgaggttaagtcagaaaaggaagagccagattctgcagcattgcagcatatggctcaggaaatcaagattgagaatttgcaaagggaagtttgcaaattgaaaaagaagaacaagaagaggaagaaagaagttgaggtagttaaaccaactaaacctaagaaaccggactcctcttcaagttttgaggacgatgaagttctacaaccgcccccgattgcacgagtttcaaagtttaagcctccgaaaccacccaacttcagaggcatgtgggactagcaagttttggaagattgggtctacgatatagaaaactatttcatagcggcagacacagatgatcatacaaaagttgcgtatgtgcaatccttcctcaccgatcatgccaaaacttggtggcactaggtgtgtgttgaaaaagagcagactaaaagttggaccaagatgtggtcttgtatccgtaaagaatacttgccgaataatcttggtttgagacttcggcagttaaagcagcaaggggacctcatgcattacgttaatgtgttttctcagaagcacattataattgcaaatatgagtgatgaagatgcttgaagttatttcctaaagggtttaagttcactttctcacaatgaggttttgaagtttaagccaaatatgtatctagagtgtaaggacgcagcacagtaagttgcatttagtcactcgctcatagaacaatatcaaccatatgctggtacctcggataagaataaaaattctgggaataaacaaagtgattggaaacagagggtggaaggcaagttccaccttggaggctcacaagcaacagttaacaaaggtggtggtggttggaggccactagcaacttcttctagtcttatgccctctgttcctcctcctggtgggtacaagcagcaacaacctacaaaacctgctcctagcggaacgggtagtgtgggtcattgtttccattgtggagagtcaggacatacgtcctcggaatgtcccaactagcataagacagggtctcttgttaatgtcatgagggaagacggtggtggtgaagttgaaggggttgacgagttggtcaatgcagattataaggaagaggaggtgagttactttcgtcaagtttttcttgcagtcaatgcaaacattgatctgttcatatatctggtaggctttgtccgcaaacaccaaatccaagtgatgattgacacaggagctatgcacaatgtgatatccgaagacttagttaagttgttaggattgaatgctaagtagatgtcgcctatgcacttctagtttgcagaaggtgggcaagtagccaaaaaatttttgagtgatgttctaataaaaatatccaagtggaaagaaagagtggacttagtagtgttgaagatattagatttttagatggtgtttggtagggatttcttcaacaaatatgttaaagggatttatagtgctggacaaagtcatatcacgttgaagtcaaaaggatgtcctaatgtgtccttccaattgcaaaagcactcctcaaaggattgggatgccaagttcatgattgtgagagccgctcaaaaagcaactaagaagggatttcggaccttttgggttcaagtgatggaagttgagggagttggtgactcaattcgaattggtgatggggttgatcctgtaccaaagaagatattagagttgttggcaagaaatcaggatatctttctgaaagatttgccaccagagctacctcctagccatgaggttgatcatcggattgaggtcattccgggttctacaccacctacaaaggctccatatcgtctgaacatcaaggagatggttgaactcaagaaacaactcacagagatttttgacaaaagtcatatccgaccaaacaagtcaccttatagagcgtcagtacttttggttatgaaaaaaaatggaactatgaagatgtgtatcaactattgggcactcaataagatcacagttaaaaacagttatcctttaccttgcattgatgacattttttatcaactcttaaaggccaagtattttatgcgacttgatttgcgatccgggtatcatcagatacaggtggcagatcagaatgtggagaagacagcctttaagacttggtacggatcttatgagttccttgtcatgccatttgggttatgcaatgctcaggcaatgttcagcactatgatggatagaatattcaaggattacttggacacatttgttgtcctatatatcgacaatgttctagtctttaatgaaacgttggaggatcatttgaaacacttagagctggtgtttcaaaagttgcgcgaacacaaattgtatgctaaggaaagtaaatacacttttggacaattgtgcgtaaactttcttggacatatagttggtggtggcgtaattgaggtggatccaaagaaggtggaagtggtgaagtcctaggaagtcccgaccactatattagatgttcgttcctttctcagtttggcgggatactatcgcaagtttgtccgcaattttgcaacaatagctcttctgttgactgagttaatgaagagtagtataccatttcatttgacaccaacttatcaatgtggttttgtacgattgaaggagatcttgactatagttcctattcttaggatcctagatcttgataaacccttcaaagtgcattgtgatgcatctggctatgctattggtgctgtgttgcaacaagattgtgacaaagcagttggtgttatgctaaggtgacatggttgcgttttattccaagaaattggatgaaacttaacgaagatggccaacacatgagaaagagatgtttgctatagtgtcggccttggaacattggcgacactacttgggtagacataccaaggtttatatagatagtaacacactaagttactttgctacacagcctaagcttacgccgaagcaagctcattagcaagagaagtttgctagatatgatattgaaatcatatataaacctagtaaagacaatattgttcttgatgcattgagtcatcaaacttagttctgggcaatatcggcaattagttcggactggttggaggatgtttgggttttgtatggaagtgatctattggcgaaggcaatcttgcaccgtacggagttgttgaagcagaaccctggtagcgaagtggcaaaagttgctaatcgaaccaatgtgaaacttcacttcttagttcgggatgggcttatattctataagcaagaaagattgtatcttccctctaaggatctgcaacagttgtttttgcgggaacatcatgatgttccggcagcgggacatggtggaaagcgaaagactctagcttcgttgaaaaagggatttttttagtctggtatagaaggtgatgtagcggattatgtccgttcctgccctatatgccagtaatgtaagcacagaactaagaagtaggctggaaagttgcagtgcattctagcatcggcatggccatttcaaagtgggacacttgatttcgtcacttgcttgacgaagtttaagggttatgatactttgatggtggttgtggatcggttatcgaaaattgcacacttcattccaactgtggaaacaatgaatgcgaaacaagtagcaaagcactttttccatgaagtagtgtgggttcatgtcttcccaaagagataatctcgaatagagatttgaggtttatggggaagttttggggtacactattccaattgtttggtactaaattgaagtgtaatatggcttatcatcctcaaactaatgggtagaccgaatgtgtgaatgctcaagttgaggattatctgcggtactatgttgcagcagaccaatgcaactgggttgagcatttagacacagcggaaatctgctataacaacatgtttcacagcactattggctgttcttcatgggagatgctacaaaggaatgcttatggggtgcctcaacagattgttgtaccggaaccaatgtccgaagtgttggtctcggctattgagacttatgtggagcaactacgccaaggttggtctagagctactgaggtgatgggcaaagctcaggataggccatcaacctgtatgacctggatctgaaggcttagaaaatgagtagacaagttcactagcgagccgtctgtgcctatgaatggatggaacatcttgtccatctcattttgcatggcaaacggattccctttggactcaatttgatcagggtcgaggaatcggaggatcatggggttttttatcaaaaccagatcatccatgtctgaaggcaagttacaccacaaaggtgaacatgagaagcccatgggaattcctcatacttgtctccatactctatttcccaaccagacatatgtgttccggatgataaagttatttagctcgatgacttttgttggatccattctggttgcctttactaatgagtggtgcagaggtttccattcggcctcgagatcattgttcttcttttggattagaaaaaaggtctttttggaggtgattttgatgcgcgaagggtaagttgacaagatgtgtcatagccgtcataaggctttgttctccctcaagggggatggcctcgtagcacttggtgatatctcccgtatagatcgtggtgatcctgtctgggagattaattgcgaactcctatgtggatccacgtctttcctccaaagaattttgcccatgcacagaaatgatcagctatattctatacttgggtcagttttggtaggctaacttcggcacttcggtgcaagggtctaatccataactatggggataattattatagactgatcacatgtccctgcctctctctcgatgactcatttttttgaaaaggggcatggtcatgtaaacaacttaatctgccagtttataatagttatctaaatcttcctttgctcaggggaagttgggcctctggccttctccctatgtccctgcgggcaaggatgtatcactcctttgtaagctgagtggtacttggagcagtaagggtggctaactccattagtcatttccttgttagcaacggtcgaagggtgtctaggtcataacatctttggacgtaaaggagaggtcgttccataactcatttaagtcggtgtgtttcccatatagtgtgcttttcattaactttcagagttgtttccttaacggtttgctaaactcgggtatgcaccgatgaggacatcgatcttccgcaaatgtgactttgggtatcgaaagatatttgtcggccagtccttacggatactctttccttactgccataacggtaggaagtcggtatagttggatccctttggtggcccctgttgtgctagtggagttaactaggcattttgagtgtacttagagtggacaagcataaggacggaattcttatgtgttattaactaagcatacttagcctggtaagaagttcctatctcgttatgtcttgcactgactagtgacaagaaccttcgtgtgttgagactagtttctcaatatcgctagatgatagtttaccatgtctaccaaacatcataccctttgtattagtctcatttcaatcctaaatgctattcatggaaagtgtctagattcgctcatttgacatatctacgaaatgtagatattggcccaaacacaatggtgttcgtcctgtgttcaaattcacaatctaaggacattccatatttaataagtttcaagtttgtcccagaaactaactcttggtactaaaggaggtttagggtgaaggggggggggggtggttatagggggttccaaatgtatagtaggaatagtggttaaaatgtatatttgatcatctaaaacattagtttggctcttgctaggctgtgtcactccttgttctatgtctggcttgggtttaagcccaagctccatgctactctaatcagtggggtacctttttcctcgcgttaagacattggtatgccaaaattgtgccagactctatctgacaccattttgcatgcaagtgttggatacggggagctagtgcttgtgggattgtactggactttcgttttatagcacaacagatttggagtttggctctaaattcatatgcactacaaattactaatgttgagtgtgtcatcctactataaatacctttgcttgtgaagaaaacaac

SEQ ID NO: 14845 - DNA, 6082 bp, Selaginella moellendorffii
  Intron number 1 from transcript 30615 (locus 30615) derive d from phytozome v7.0 (chr-ID scaffold_38; pos 462599 to 4 68680)
cctgagatagatctcgtttcgtgcaacaccgtgatgcgatgctgccgtgatgctagacaatcaaatcttatatttgactccatgccgcagagagctctctcgtcgtggacaacaatgctcgctgttcttgccaagaacagccccggggaggaaaccaagagctttttctatcaaatgccggagcttgatcttacttcctgtacgataatgctgctctcacaaccctcagacttggagcctgtgaaggccacctttgatcaaaagccgcagcgagacctgtgctcttggaactctgttctgtcggtgtatgcccaatcagggcattgtgactttgctcttagactctttaacaagatgcccgaaatggatatggtttcgtggaacacaatgttaaatgcgtttgttctaactagcaaactacgtgaagctgctttactctttcatagcatgctagaacgcaaccttgtgacctgggatgctttgatatctgcattttcccgagaaggccatattgtatacgcaaggaaactttttgatacagcccctgacagagaccaaatcttgtggagctccatgatagcttcatatgcacaagtaagcaccactgccagcaaggcctttcatctcttcaacgaaatgcaggccgtcgattccccaaacacatcgtgcttcgcatccatcctggccgcaaacagccacaaaggcagctttcaagcgggaaagagcttcttcgcttccatggttgtggatcacgccattgagcccacaaggcagcactacagttgcatggtagatctcttgagccgagccggccaccttcacgacgccaaagatctaatcttaagcatgccgttcgttcccagtgctctcgagtggacgtgccttctcggagcatgcaagagccacgaggattataacagtcttagactgggagacgatgtagtgagatctgtaatgaacgtaaccgacgcaactcccaagacaccctatgctttactagcaaacgtctacacaagctcccaaacaaaaaatccacactatatgtaaaatctaaggacttactctctcctgtacacatgaagtcattttaatcacctccgccaccgccacctcctccgccacagcccccaccgccacagcctccgccaccaccacagcctcctccaccgtggcctccaccgtggtcaccaccagagcctccactgtggtggtggccaccgctaaacattgctcccacgaaatcggatcgccttcttggctttcgcctttttggagatggaaagaaactgaaacacattttggattgattgcttgcaagggggcataatcttctgcttgtatacaaggctagaaggcaatgtgagactttgactcagaggaagccacgaagaaagcaatgatagcgcgtggacctggagaagtttatgcaatcagtgccacgtcgtgacacttcatcagagtgttcaagaaacgcaagacgtaacactacaaacgtgcatttgtctatccaatctttgaagaatacgtgcataaaatctcgtcaaattgcgcgtgaaggaagttgctttgcttgctccatatggggccaatcagatgttctcctgcctactatataagcgcaagcctcctcgcatcaatcatacctttatcttgcgcaatccaagatgtgtttcggtttctctcaatcctctaacaggcgaaagcagaggcgaaggcgcccgtctgcagcaacgggcgccttcgtgagtggtggcggagcttgtgctggcactggcggcggaggctgtggtggcggtggcggcggtggtggtggtggtggctgcggaggaggcggcggcggcggaggctgctaaatactctgtatgagaaatagatatgaatgtttgtaaatatgcataatctcaaacttcctcaaataatacgtacaatttgtttgttttttttacagtcaaggattgagctggccacgatcttagcactgttttggaactagtaagtagaatctcgtagaatctattcagcaattctatgtacttcaggtactatagtgattcatgtaaaatccaaaaaaaagggaaacatctacaatacaacgttttgagcgctcttctcttgtcttctctcgagtaaaagctttgattcttctagctctctcttgcctcctgttttcttacgattcgcgtcgggttctcctttgacgggcgccctcgccttccttctcaatctcgttgccacccgcgtcgtcctccgccttgtccttggaatcgtccgggttggagatgtcttccttcttggacttctctacagtcacctgaaccatgagaatccaaaactagcgcaactctattgctaattgtaccttcgtcttgttggggggcgatttcttgccaccaaaaagaatcttaaacagcgtgaccaccaagatgagcgggatcaaagctatggcgctcaaagaaatggttgggaacttctcggccttctccagaagatcctgtgtgtcacaaacgaaaagaaagtaagaatacgagacaaagtccatgctcatgtgttttacttacaagaatcttttccttctgtgacgccaaagtcgggatgtcggcaaccttgcgcaggtactcaaacatctttgcctgaaaagattcaaggtcgtcacacacacacacaagaaagaaaacaaaagacagacaaaagaagacaaaggaaaagtacctggatgccgtcaggattcggagtcgcttcttcaattttttgcttctccctctcagcctcgtacttgggcttccatttcgtctccctgtactctgctgccacagcctcgtcggtcgccaccaggatgttgtcaaaaagaatgccgtcctgcatcgtccagatctcgatccctatcgccgagatcggctctagatccggcctgtccaactcgaagtactccgggttcggtatttgcttcggagcccagatccccttgtaagccgggttgtcgatcacttcggaggataccacttccccttgtagtccgggttcctcttcatgggcctcttccattctccacacccagacgcttcctcacactttgggttgctgatcttcgggggctcccactcgccatcctcttcgtcgtcccagttcgcgggcttgctagcttccggatcgtcaacctcgtccggctcgttgtcgtttcctagcacacaagcctcacaaaattcaagcttgcctgtaaactcgaattcttgtgcatgtgcttgatctctggacactgctttgagggcgtcttcatgcacatggcctagacgctcatgccacaactggagattactcgctcgagttgagagcgctcgatctggctgcttatctggaacaaccatggtggcgtcaagtttataaagtccagaatagcgttgtccataagccactgcttgatctgtcttctcgtctcgcataatagcctgcttggcattaaaaataaaatagaaaccgttgtcagaagctgcaccgattgagaaaagatgatacgccaagcctggaacaaaatacatgttcctgatatctcgtagctctcctgaggccagctttacttgaactgtgcccactgctacaactgaaagaagactcttgtctcctaaaccaacctgcctgcctgtagaaattttcctgaggttcagaaaagcttcttgcctgcctgtcatgtgcatatttgctgctgtgtccagccagatcacgtcttgatcctgctgctgaacaaacacaggttctggaatagctcttaccataagagctcttgactggtttgtatagccagtcctggcgttctttctccccaaacctcgaggacgccctgctaacctgtctcggcattctctggcgtagtgtccaacccgcttacaataattgcactcacctttacgctcgcgtgagttgctgtctccaacattgctagccctgaaactgctcgcagtgttgctcgcaccagccttgaaactgctagcgctgcctcctttacctggagaattctttgtttgctttgagttgacaaacaaagctgtggttgtggttgtatctgcgggtgtctggtcttcggctggttcttcttcattgataagagctgcttgcatttcaatgaaggttttcgttgagttcttgagcatagtcttcaatgatttgaattctgggcgaaccaaagcattgagaagaactgctcgcttatcattctcggtgactgcttcacctagacttgacagttgggagagcaccgacttcagccttcctagaaaagctgctggagtctcgtccgctgccatttttaagccaaaaagtttagactttaactcaacctttgaaatctctgcgctcgcttggttcccaaatacgttcttcaaggctgtccagttctcttctgcggtcttcgtgatatccaggtggtggtggtgcaatttgcccaggccaatccccatggtggagactgccttatcgtttctgacctgccattcgtcttcatcgcttgccgctgacttcggctctgttccttggacaattctgagacagttgtcccggagaaagaggaacgaaatttctttcgcccaattctcaaaatctgtgcccgtgaatagagggatcggtattagttgtggtcatttcttctacaatttccagcacgctccacttttctacagcacggatttttcccttcctcttcttctgctgcagtcgagcagtcacgcgatctagagtcgcgtagccttgctgctcgttgcgtggtcttgttttgcccatgagatcatcgtttgctccgataccatgatagttttctagttaaacgacatactctgtttcccctaacctactaccttttcattttctccatgtaaatatatacaagtcttgtgtccgctcatttcagcgtccacataaatctcttgccaccttggattagactccaggctggctatctacacagccagtcatcgggcttgaccgcctccgcgtcctcgatctccagtggagcgtcctcgtcccaattctcgggcttggtcgcttccggatcggggatcttcgcccgatcgtcccagtcctggggcttcttgtcgtcgggatcggagatggtcttgggcggatcacggccggctcaaagtcgctcgagaggaggtcgacgctcttctcctccttgccgtcgacgaggatcttgagcgtgttgttcgggtagatcactgccgtgtagacgtgagagagcttgtcagccactggcggtacttgaggtgatgcttgatgtgcttgtcggatttggggcccttgtgcttgtagatgaattgcaccttgttggtgtttccacatttgtctggcccaaacatgattgagtagggggattcattactgaaattgccgggcgtccattgcaagagaaggaacttgagataggcgatgccacactctaatcccttctggaattataaagattaggtttaaaccttagtcaaacacagaataagggagttaaattatgctttaagttagtcatccatgtttagcttacccaatatctttattatatttttggaattcatcaaaaactaaaaaactcaaaagtagttttatggtgaaaaaccttaagagaatattagattttgtattttcacatcagattataacattggtattggagcctaatttaattctcatggctgacaaatatggaaggaaaaccaaggttatggtgactagaggataacttaaatatgattgtagatgatcattcctaaaggattgttaagcaccaaattaaggtaatagaatagaaaaaaggcttgtaatcaaaaccctcctttgtaaaaaaaatgcatcctttaggattttactttagtcccaaaaattaatttttaaaacaatcacaaaaacttactaaatataaaatgacactagattgcaaatttagatgcaagaataacaaagtgtatatttgacaaaatgatatgttaaagtttagtactgtggagtccactattgtatgtctacacaggatcaagagatatggactttgacacgacgatttttcgataaaatgccataccaacagctagtttcttggaacacc

SEQ ID NO: 14846 - DNA, 4198 bp, Selaginella moellendorffii
  Intron number 4 from transcript 412724 (locus 412724) deri ved from phytozome v7.0 (chr-ID scaffold_18; pos 1932409 t o 1936606 reverse strand)
caaccttgggcagtttcggggtccgggggcccaaggttatttgaataacctagggccctcaaggccgaaactgcctgaggtggggagcctaagcttgacctcgggtagttttggggtccgggggcccgaggttatttgaataaccttgggcccttgaggccagaaactgcccgagctggggggcccaagctccacctcgaggccaaaaactacttggcctataccctatttttattttattattaacataagatacattcaaattatatgtgaatttcttaaaattaataaatgatgtatattattatatatatatattatatttatattagttttctcaattatatagaaaggatgcattctcaacaagatttcatacatattttggattcataacagaactttaaagagtataaatctggtatgttgcattattatattaaatatattgtactattttaatctatgaatggataaatcctcatccataaatttgttttgtattgtgtatgaacctaaattacaggcacatgctctaattatcattgagcagtatttgcatatatggctaaaacttaactcatattgagaatcaaaactatgtcattgaagaattatcattactgacatcgcctaacactaaagatttgacaaactactgatattttacatgtgattggatatcttggatctccatgccaaagcagaatgtcattactatcatcattcacaattaaactttacgtgctgaaatccttttcttggatttatgtgcatgcaatagacaacaaaacacatgataatactatcacatttacacatattagatatgctatagtatttaaatttatttgtacgttgttattattctttttattacttgtaagcaatcaaagagaatgactcgagagacaatccatggggttcaaatatagagggaaagagcccatgaataagagtgcacccccttttctaatcggttaaaggttttgggatacttggggttaagcgtccttggatttgaatagtactgggttgggtgacctcccgagaagtccaaattctaggagcttacattgctgtccttaaatctcaatttatgtttcactatagatttttataagtagtataagggacatagaaaactccaaaactataatgaaagatggaaaggttcttctacattttcatatcacgcaccactttttttctctcaaagtcatgtttttaaaagttttgtatgttgccgttttctctcaaagtcatgtttttaaaagttttgtatgtcgccgttttaatcttcatcttagctctattttgttagaggttgtgatccacaacaacaccaatattgttgttgcttggtgttttttctttctagtgtgggcaaggatggataacattaagatttgcagaattaaaagtctaaagaaattcatgtttttggatctccaatcaaagtgtttaagctaaagtgaatatgaagaaagagttagtcatcatcctctcctcctcttccagttcaagtggaaaagttatgctagtgtcagccccaaattcacgagctccatcttcagtaatattcaaagctattagtaatgctttccacttttcccacttctcaataacgtacacttatttctatatagacctatgagtgagcttctgtcctattacaacagcaatatcttctttgatctaaagcctcttgtcaacaacattagttccgaacaaaaaggaatggagaccaagtaggatgtctaaaactggtgtaagatcaagaccacacacttccagcattttgaacaatgtctatagttcattgtggtaggcatttagattgcatagatgaaacatgtaatcaaaatagctataaaaattttatattttttgaaaagtctacaatcaatcctcttgcccatgacactattattattaaattcaagtgttggttttgcaaaaattttcctttatattgtgccatttacaaggccaaaatgtattacttccttttgtgggatagagtggttggaagagatgaagtcttttatttcttctttatttttgttgccttttaatgttgtctttttcactagaaccaaccacttgaggaccttacgtacaccccaattatgaatctctccaaaagtaaccactaaagctagtatttttttgaggcagaaaaaaggaagataaatctgtataaaacatgtttattagatttgatatatgctatagagtagtcttcaaaagcattagcatttgaagtaggaaaatactaggaacaaggctttttgttaagatgttcaacgataggatatagaggaaggtgattccaccagctcaagaagtggcaactgtcgttgagaaagtggttcgtggcacatctatagagtacaattcccaagcttttattaatgacatgaaaactgttcactcaaagtattgttttttctttattagtgaagatattggtatagatcttggaacaaaaagctctcataggcttaatattgagtaccattttactccaagatgttgcacattgttaaaataaaaaataaagagtacacaattgttattcaatgctttttttgcacataaccaaactttactaagcacaagaaacataggaaggcataagaaggcatatatatattacatttttattaacactttacactaagatcctaaagtggacatttatatacactaagcaagctttactactgctaagttgtaagacttttggagctaataatactattgatatttattctctatcagtaatatatactttttatactttattaataataaaacattcatttcatttcatatacttccaagttttctttttacaatactatctataatactagtgtctctctgtttttgtctttaccatctcaaaacatatttcatagtagtttggggccatgatattacaatctgttacaaaagtgtatatgttgttgtactgactgtcaccactatttccaccaaaagctagaaaacaaatggggcatttcttgaaagtcatggaattgcaattttttaaaataaatagaagggcattttttatcacctaaattgttgcaccctttatcattgcgtttatctctaatatatgatcattattctcattatcctatttttctatcttttatatggtttggatgtgttatgcaatgggatgaatattgtagcttctagtccttaaattactacccagagaagaaagatgtcaagagttgaaactaccaacattagaaccattttattttatgttttagcgaacttaaataaaataacatatagtaaatatttaaattcttggacaagaagcctcctctaaaatagttttatccatataaaatgtagagagttatgaaaatataatataaagttaggttttttataacattaattttttaaaatttataatatttgtattaaattgcaattgaaaattgagctcaactcgtgaactcaacttttcaactcatgagctcaagagtggtccacgttcccacttagcatatttctatcgaaggcaatctttttctagcttaagaagggaaaaaaaacatcggcatgctcttataaacaatggaaagcaaaactcgatggccatgctagaatccccacattattcttcaaaaactagaaaagaaaatatgctgggcggaaaaataccacggccaaaatttgtttttacaagtgtatgggcacacacaatcgatcgcgcatcattcgtgccatctgatcaaatcgccctacccctgtgacctacgaattgcctccaaacagcgccaggggcgtccccttcctcctggaatgcctcgcgctggaatgcctcgatggcccggccctcctggaatgcgttgccaccttgagaacgcgccctcggcctggggagctctgccatccatgaatcgcgctgcctcctctttagtcattgcgaaataccctggtcgtgtgacagccgctccctgctcccaagtagtgacgcaaataggcgcccactttgccacttcttcgagtggccaaacaaattggcggcggaggctctggaggatccagcgatgacaggataggcagaggcgtacggctatgcccttttcccgcaagaaccctaaactctttcaggatcttttctttttgggcaggccaacttctaaaaggagtttcgtag

SEQ ID NO: 14847 - DNA, 24811 bp, Selaginella moellendorffii
  Intron number 1 from transcript 50634 (locus 50634) derive d from phytozome v7.0 (chr-ID scaffold_39; pos 248736 to 2 73546 reverse strand)
gatctcgcagaatatgtgtttacttctatgccttttctcgacaccatttcatggacgacgatggtggacggctacattcgtgttgaaaagttggacaaggccaagcaagttttggataggatgccacaacttgatgtggttgcttggactgcttggttctctgcgtatgccatggttggagatctggagatagtgaagcaaagctttgatgagctacatttgcaaaaagatatagtggtgtggattgccttgttatctgcttacgtacggcgtggctgtctcgatgaagctaagaatactttcacccaaatgcctgaaaggagttcaatctgctgggcgatgatgatcactgcgtgtgcccaaaacaggcatttggaagatgcactctcgctgttcttagaagttccggagaatagcttgtgtgtttggaatgcaatgcttgtggcatatgctcagatgagttcgatatttcgtttggagcagttctttcaggatatgcccgagcgaagtgtagtttcatggggcgtgatgatagccaagttttctctcgccggtgacatactcgaggcattccaagtttttgaccatatgaagatggtggatttgcccgacgaggcttgtttcgtgtcgctgctaatcgcgtgtagccacgaaggtgaagtctatcgagggagaagtttgttcgcgtctatggtggaagattatggaatcacacccacgagacagcactactgctgcatggttgatttgctagcccgcgccaagcgtttggagcacgcgaaagagctccttagtaccatgccatttgaagataaatcattcggctggacatcagttataagtgctccattgtaaagggtttaagggtgcaacttattaggtcatggcaaagcttggaacgacgagatgtggtgcaaggtacgctccttacgaaaccagtgatagcaaaagcaagaactaccaggtggccgagagtgtgagcaggctgaggcacgctctcgtttatgacaatggaaaagtgttgcatgtatgggatatggaaagaggatttttcaactacaagctaccatatccatcccagatcaagggtcatctttgcggagtcgcgggtggaattctcttcttcaaggagaacagcaacactcaaaccatctttgcttggaacccagtgactggattcgtaagagagattaatcttccatcggtggagtcagagtttctagtcattgtcacgcccaagtcacacaggctctgcaagctcaacccgagcctcaagctcgaggcagtgggtgccccccccgtggaggactggacgcggatttgctatttgggcgagaggttcaatggagactcgggcatcaagatcgagtgctcgcgacatttgtcgtatgctaatgtcctgggcacgagctcgctgcaacagctggatgttttggaagcgacaagaaatccagttagaacaatcagctctcccaggccgatcaaggggcgaagctttcatcttccgcgaagtcctgggagcgtcaagtatcgcttctttcagctggagcaggacgtgtttgtgtgcgtttcgatgcagaggcgcttgcatttccaaggttgcgtgaggatctggctgtacaagcctggtggtgatggtggtgcaaagagtcttaaaggatcgtgccatgcatgccgtgttgcaaagacggtccacggaagtcacctcgctatggaagaactttgtgtatgcagcaacaacgaggactgggaagacgtgtcaaagttgccagacaagtacgtgcatgggttattgaaagagtcaatctcgcaggacgatggtgccggctggtttgcgtttgggatggccaacattgtcttggtggcatttgtttccaagagtggcgacttgagctcttgcaaggaggtgtttcgcttcgagctggcgttgagagagtggacccgtgtggcaaatccattcagaagctctcggggtgttaactggaacaacatgagctgctggtgtccaagtttttccaatctggacatggattgggggtggtgttcttgatggatcaagtagttcatagaagatcctggagtgatagtgttctctttgacagaaatcttatatcatattaatatacaacttaccctgtggttcatcttacaaccacaaagtcaagctctaaacgatagacacaccctctacttgggcttccctaaaacgtctgccaattcaaacttctcaaatccaaaacgtcctctccaagcagtatagcaacatgaagttgcagaatttggtccacgactactttggacgcaagggcttggttttcttgagttcgactagcacttgagattctgtaatgatgtcgtccacagtaaagatgaaactcgaaagaataccgatgccaccaccaatttccaccaagccgaagtactgactactggcatagacgggtaggatcgttcaggatgctccaaattgatcagcttcttccaatcttgtggatccaacacacaataacactcaccctcaatatcaacactaagtttctggtaaagagctcaccccagcgttctactcttgaatcaaagtgaaatctccctggaaagattctgaaaatgcatcttttataaaagcataaatactgtgaatttttttctggagttgtttgtttggagatggtctaggctagaatatgcatggacgagaacgttgatcttctaaaaaagggagagtgtcttacaaatataattgtgaatatcaaaaggtatttattggttttctttagataagaaattgatatttctagttaccttgattgagtatatagtaggaacaatagcattatttaccaccctagaacactaaatgtatcataggaatagtggtattatttgccaccctagaacactaggtagatcatgtatggttaacaaacttgagacattgtttgactctctattgggagtgtttattctaattgttcctgaaatatttaactccatatggtgaaatatttatatccttaaaataatgttagatctatccatcaaagagtaatgagaacaatagggaggagggagtagagagagaaatatgagataaacaaaacctaccatactttgttacccctgttgtcttatacatacccatagtaatgatcctgagttggaaacttcttccagtgccttgaagctttgagccaacaactctcattgaagggttagtctacaatggaatagaagatcttctaggggatgttgtaaaagatgtactagcacgtttggcaatgcaagatgtgctttgctatgaagccgtgtgcaagagatgaatgtgtgtattgcacaacataagttgcatgctttgggtgtttaggccttgtagggcctgtttcagtcttaccaattgcattgcacttatactcaacacataatcccacaactttaagcttttatttcaatagaaggtcattccaagcatgaattgcttggtctaatggatttataatggttggagggtgtttgcttttttagttaggaatccaaagatgaagatatggattaccattctagcaaagcttgtagcaatatcattaacttaaatgagttataggacttatctttttgtttatgcaaaatgcattaattatcaaacaccatttggatgtcactaacaaggaaataactaataaaatagccacctttgttgctttagaagttactaagcttacgaaagatgatatgcccttattttcaggtgatatagagagaaaagtcaaaggtcttgagcatacaaatcaaatctaccaataaatttagatagactaatgtaaataagtagttagagttatttatatatattataccctttgtaatgaaatagaaacattgaaagagaaagcaagtaaattttccattttactttaatcatttaaccacatcttttaccacttagagggtctttttcataacttccataagtcccattcttaacttggggacttattagccataagaatggcttttataccattccaccttttggttcaagtgtttcacgtgtttaaacccataatagacacccaaaggtaccattgatatatcattccattatgctaaaattatatccattcacttttgtttcattagtaatccaagaccatccataccatagtctcatctcccaaagactaagccatttatctatgagtggtttcccacaccttagcatctttaggatgcctagaaatataggccccaatatctcttctttggttctcatcaagtccctctccatccacaacaatacttacaccactattgagttagggtttaaaggcttgaaggctcgaccactaagtcctattgacctctaatacttcctcatcatacgaccatatccttattcactacacaaaaggattattcttcttcctttccataatttaagactttatgacacatttcgaaacactatagccctacacgagcctcatgaatattccccccaccttttgcttttagccatgtggttaaaacaaggtcctaatgagctacatcaggtatccaaataaatagtgccactcacacttaaattgagagcatcaaccattttatcttctaagggagctagagctagcttttgaacacttcaccaaattaccccatttgttcatccgtgttcactttagccttggactcctcaatgattatatcatcacccactatataaatataaccttcctagatcacactagtcttttctggccaaattggtttcactggagtctaacccctacactcaccctactatacttttggatttataatggttggagggtgtgtgcttttctagttaggaatctaaagataaagatatggattacccctgcaacaattaaatgattcatccatacttaccaaaaaacacatttgatttgtaaaaacttgttcataaatgggcattcacattctgcttgcagagagttcccaagttaaacaaatattccaaattaaactaaaatcttttacaattttttatgtttctttccgcgggcgggaggcaattgctagtgcaatggctcgccaagctgcctcttctgatcatctaaggaaaaaacaaaactccttgtgggatcgattcactatctatagtacaacttataagcaaggctacaaacaaggcccctagacttgcaagttctgcaatgagttgaaatctagttcactgaagagattgattgtgcatgtagggagggtcctaggggaaaagattaaggtttgctatggtcatgtgcccttgaatatgctcaatgaaatgcaaatgaagttcttcagtgattatcatcgttgtgaaccaccacaaaaaaatggtcctactatttacattgcaaatgcccagtatgtgaacattaatggggagattttcaagactcctttccagagatcagcttctgctacctacccaccaattatgattcatggaacatcttcatttctgccaagtagtaatgcttcaagtcaacaatccctagctgcgacaatggattttactgctttgaatgataataatgtagcagatgcccagacaaggcaagtaatctctggaggactttttagcgggcaacaatggagtaacatatcaggtcctatgaattctagtggggaaatgcaactgggcttgggcatggttgctggcagataacaagcttgcatacaacatggcaaaaccagaattacattgatgcaaatgttgctatttgcaagttcatctacgaaactacacaagctttcaatattgtgaacaacctgtactagaaagagatgctcggtgctgtggggaaagatggtccaggctactttttggtgtctccaaagtatgaagcaatccaagtgaaacatttgaatgaggagtatgaaagcttgaactcaaggctagatgttgtgcgtgaaggctagaaacaattcggctacacaatctcactaatagctggcaatgctcaaggaaacgaagcattgtgaatgtgatggtggtgaacattcatggatcaatgtttctgaaatcatttgatgcgttggaggagaagaaaactagtctttggttgtggtcaaagttgaagcttgttttcatggaagctggagttgtgaatgtggttcaaatgatcactgataatggctccaaatttgttcacatgggggatttcatgagggaggagtttccaaagattgttcatggcaaatgtgtttgctactgcttaagcctcctcttgaaggatatcactaactttaattgggttcaaccttgtgtgagcggctatgagaagattgtcaatttcatgctgaagaagccaagcctggttacaacattccgaaaaattgcccctcgagacctcatcaaaccaacatcaactaaatttgtgtacaactttatggtgatgagctccttgactgaactaaacatgctcaaagctttgcaatagtttgtggtattagatatatggtaccaaaattgggataaactgagtgaagtatcaacagtgaaagtcctgattcaaaatggtggtttttggcattgttgtgttgaggttttactggtgatggaaccgattttaaaggttctaaaattggtggattgagaagaagcaaccttggatcaagcttaagaggctctttaggttttggctgtgaacaagatagttgctgaagagaggattaacgccatcaagcatttcatctttgagttgagcacggaagagcttgacccagtgaatctctagatgcaaagcaagagttgatggaaaatgctccactctacactccaaagtattgctcattgtttgaatcttctctggttgagcttgctagaagattctaaagcaaagagtgatcttcacgattactttgagatggtggctggagctaagaactatgagctgcttcaaaagctcactttccaatatcagattttcagggaagctgcaccacaagaatctcgtgcaattaccaaacattgaaaaatgcaactccatccagtgagctggtggatagagtatggatcagcgttgccaaaactttaagagccagaccatatcagcttcagcctttgagtgaaattagagcatttggagcatcatgcagacaaagaggcaagctcgtttgcttgtgaagaccatggagaaactcgtcttctactacagcaacttaaagctgctcaaggagatcaaaacacatgagataaggcttctagaggtgaatacggatgaaataaaggttgagcctcaatggattagaattattttgatacaggaaacactcaaggagattgaagcggagctacatgttgaaatggaggaggtttatgatgatgaagtagagattggatcaaatgttgatgatgaagaagaggaagtgtgatcattgccatttgtgtgtttgaaatctgaatttcaagtttcaatgtttcaaatttatttcttttatatataattagggtttctttacagtttaattatacaaactggtatcttgatttgtctccatatttgaacacatttgtgtccatttagtttgtttcattctattgtttgccagtaagtatagactcatctttttgtttatgcaaaatgcactaattatcaaacaccatttggatgtcaccaacaaggaaataactaataaaattagccacatttgttgctttggaagttatcaagcttacaaaagattatatgcccttatttgcaggtgatatagagagaaaagtcaaaggtcttgagcatacaaaccaaatccattgataaatttaaatagactaatgtaaataagtagtgaaagttatttatatatattattgtaatgaaatagaaacattgaaagagaaagcaactaaattttccattttactttagtcacttaaccacaactttgaccacttagaaggtctctttcatagcctccataagtcctattcccaacttgaggatttgctagccgtgagaatggcctctataccactccgcctttatacttggttcaagtgtttcacatgtctaaacccacgataaacactcaaagtaccaatcatcctattatgctaaagctatattcattcactttcgtctcattggtagtccaaaaccatttttaccacaatcctatttcccaaaaactaagccatctatccatgagtggtctcccaagactacattttagcatctttagcatacttgcatttgaacaggtatgattaataaaaaacactgtttaaaacgtgtgtataatacagcatttaaaacggcttttaaacaccaagaatattttaaaaaccctaaagaatatgctttcttttacttaggattagggttcatgtaaaatcagggttcgcaggatccggaagcactgaggtaagtccaggatggggggaggaaggcagccatgctggagctgggctcatgttctgaaactgaggctgacatctgagataggccacagcatgagtccatggaagtgtaagtattgctcgaatacttacaccggcgcggctgaacgagttcgcgctcaccttaggggtgtgaaaggaaggaatgtagagatttgtacaggacaggtgccactggaggtggtgaacaaggctcgggcatcttttaatcgtgtggagctcatgaagagctccatgattgcagcaagtccccaagagagacttgccttagctcacgagactaaggtcggtgaggtgagtggtggtgccagttgctgggcaagtggtggggctactggagggctgggcgaggcgagcagcagcagcattccactttccgggagcagcagccttaaacgaagtgctgcaccagcattggatggtgacattcgaaagatgatgaagtctacaaaggttcaatgtctggatgatgccgtggccgagttcttctatgtttaaaatatccctttcaacaccattcggaggctaaatctgaggaagttacttcaagctgctatcgacttcagccctagagctcttgcatagatgatgggatatgagaagctgcagagtacacagttgaagaagctttattagcattttcatcgatggctggtttgacaactgtagccaatccttgatcaacttcatggcctccaacgtctagggttcaattttcttttagtctgtaaattctgagggcaggacaaagatgggagagtggatttgggtcgagctgaagaaggtgattcaagaagttagcgaagaaaacgttgttcaggtgatcactgacaatgcatcaaactgcgtgcagatgggagaactcatgacagctaagtatcctcacattctccacagccggtgtgtgtgccacatcttggaccttctcttcaaagacatcgggagcttgtcatgggtaaaaccactggtgaaaggctgcaacgagatggtaacttttatcaccaaaaaacctcatgttctagctttgtttcggaagctgagcaattgggatctcatcaagccagcgagcacaaggttcgcttacatgtttctagtgatgtcttagctcctgaatctgacgaccttggaggcattgaaggagatggttgtgagctccaagtggcggtgattggacatcacaaagaccgccaaagccaagcgcattcgaactcggatcttagaagagacttcgaactctttctggactagatgccagcacttgttggtgctgcttggaccgctcctcaaggtcttgaagcttgcggaccgggagggggcaacttccggtctcattttctaggctatggaccggatgaatgagaagctttcaaaggctgttgagactgggattttagccaaggaagaggccaaggagatcaacaggttcatgatggaggatcatggcgagggaggtcgaaaagcagcttgttggttccaaatgcattcgatcttgcatggagctgcttttgttctgaacccagcttttcttcatctccctctcgaccaggaggcttaggaagattttgtggagtacccagagttgtattgcaaaggagatcgaggacttcaacacaaactgctgcacgagtttcaaagtttccgtcaacaacttggttgtttgttctcttcaaaggcagcaaagcaggtgcgtataaactgtttgtttgtcaactttttagactgattctcttgtatagatggagaaccggaaacacccagtgagttggtggagcaactttggtgcaggcacactagaacttcaaaggcttgctttatggatcttgagtcaaccagtttgtgcttcaccatgtgagtaaaattggagttcatggagcatgatccagatgaagaggaggtctcgactgctctccaaaaactcggagaagctggtttttgtgcacacaaatatgcgtgttgtacagaagatcaagttcgggagtttgaagcttatcgagcatgatcttgataaccttgagcttgagcctcaatggcaaaggatccttgcacttcaggaggttgttgaagaacctcttcaacaacctaatgatgacggtgctagtagtgatgatgttctagattcggaggatgaagattagattagattatattatgttaaactttgtttagtaacagttaattattttttaattatattaaaactgaaaaccattatacccattccaaaaaaacctaaacgggtattaaacgttcgatacccattcaaatccagttgtattcgaatgttcggatgcaagtatgatctttaggatgcctagagacatgggaacacccttccctaatattcttaccttggttcccaccaagtccctctctgtccactcgctaacatcattactgagttaggggttgaaggtttgaaggctcgaccactaaattctattgatttcctcaccacacaaccatatccttgttcactacacaagagaactactcctcttcctttccacaatctaagactttataacacatttcaaataccatagccctacatgaatattgtgaatactccccccatctttcacttctaagtgccctagccatatggttaaattgaggttccaataagctacattatgccactcacacttagattgagagcatcaaccatttgatttctaagggagctagagctagcttttgaacactttaccaatttatcccatttgtccatctatgttcactttaaccttagactcctcagtaattatatcatcacccaccatatgggtgtagccttcctagatcacactagacttttctagccaaagtagtttcattggagtctaaccctcatactcaccctgctatacttttggagcccccccccccctcctccttggggatgattgctttggctttcaccccataacttgtattagtattcgaattcaatctcggactcaaatttggtcttggacccagactcaaacacagacacaaactcagttttggtctcaaatccggtcttaaactccatcttggacccggtctcagtctccatccagaccccatctcggactttcttggactctatcttgaactcgatctcgaactttatctcggactccttctcgaattccatcttgaatttcatctctaactctttcttagactcaatcccgacattttcacatgttacaatacttgtcatgtgttagtccctcttatgtctttttctagaggcttgttcactgattgtttcataattattccttaagcacttctttagaagttttactcttgctcttgactttctgagttagagcttttgatttaaaaatgttatgtatgttagacttatgctttgaccactaccatatggcaccctttcggctccactttagggcttggggatttatgtcttatagttatgtgatgaatcaatagtaattaccccataactaaaaatttcaccatacatatgaagtgtcaaagttaccatatttatactagcctaaatatcaaaattaatataatggatgatatcaaagtcatagataaagatattgaattattaatcaaaaatacttaaagtagaatagcaaagttttctaagttatcatctaataaaatagtataatataggaactattatgattataatatagtttggaagatataagattaaccatccaacaaaattagcaagtatatcatcaagaaaaaaacgtaatgataatgcttaattactaaatattgtaaatagcatactaattaacttataaattaaaaaaaacttaaaatatataaagtatccacaaatgtatcacctgaatttctaatttaccaaaattaatcttaatagtaactaaaatattggactaaatactacaagagctaacaaatacttgttgatgctaattatcacaccaactaatctgaacaagtcccaatcaacaatattaaagaactaaaattgctaaagaaaatatcagtaacatcttaccaaaagactaatccaaaataaaccataaaaaatatataaaccaaaacaattaaagaaaataactattttgaaatgcttatctactataatgtactagattcataatggattgtagacacactatattgtcattatatatattcgtcaatgtttgcatttcaaagctaatgccccacaataggtgatgaatccacaatgcctccttcactacttctatcaccatattatattttacttaacatgttgatagtgctatcatctgttgtttctggctatgccaagatacaattgcattagagaatttaccaattgtcaagatctccagctatatggaacccatgtcccttctccaatctctccatctggcatgtctttgaactcaaggtgaaatactaaggtttgtgccacatagttgaagatttgctccaccttgtatcactgcctcttccccgggttctacatgaattgacatactcaagacactgccattgctatgtctggcctacatcaaagctccaacaaaattctaatatagtagctatatcatcttcgttttttctccctctcaaaatataattcattagctttggagagtttgtaaaattgtagtgcaggagttggcactgaatgtgtggtgaagaaattttatattttttgatgggattagtgatgtacttctgttaatgaatccttagaaaaaatcgctctctgtcatgagaaatttttaagcctagaaagaaagaagtttaccgctctttaggaacttcttatggtgcaacaagtattcaaaggttgttttctagttgcacattgtactctgcttgcatcagagctttccattgaaattgttaagggcctgacaaggcctcctccagtgtttttgacttgtgaacaacttgtgcagcttgagcatagtaatatagaatgttctctattggcttccaagaacaagaagatcatgtaggtgctgtggggatatcttggaaagtatgatccactaatcttgagctttgtgatctgaaatttgaaaatccactatgttaggatttgcggtaaattaccttgcattgctatttgaggatcatgttcttgtggaatgagtggagcttgcaatggaattttaggtggcaattccacatggagtggcagtggtgatttctgagtcacaagtggtgataaatctgtggtagtgtctttgacccggctttcttatgactgaaaatccaaacctaatagccacattttgtattctcactgtagccaagcattaggcatcttgttgattgatttcccatttatttcaccattcctcattggatatatacatgacccctacgcaaccaaacacacaaagtactaaatagaaggtttagccattcagtgttttatttagtacagcttttgttctgaatgtgtactactgtgttcacagcctgtgtgcagaaaaactttgggacattcatggccttgagcattgctcatgccacaatacagtcaacatccttctttgtggctatatgatcatacacatagagatctggagagatatgccttatgatgcgaggatcgtgcagaaatctgctgtttgcagactcgcacaccaagtgtatcacagattctcaactccattcaagaaatttccaaggtgcgttcaatttttgctttaaaaaggaaaccatagtgaaacaactaaggtcatctacgatcagcacaaagtatgtgaaggcccccaaacatcaatgtgaacaagatctaaaactgattaacctctagttgtagcttttttaggcaatggttttttcttcattttcacatatagacagctctcgcatgcattatttttgtatgctatacattagttactccgcaaactatttgagatgtctctttgactcatctaaaacttacatgccccaaatgagggagccataactgtaaggatgaattattagtgatggatgcaacatttacgatcacaagaaataaagtgaactccattcttatagctatcacttgggcaatttgtgttcaatggaaaatgaagttcacagctgtgtgatggaaaactgtgtagactccttgctctgtaagctgataaactgagagaaaattcttggctaactttggaacaaacaaacattagagattcaagttgaaataaattgatccaaatgctattatttgcaaagcttctctactaatagagagaagagaacttcttatagcttatctttcaaaagagtgatcggtcagggatagcaccactatccagaagccaactcttgctctaacagcataatctgcagagacgaaagacaagttctgagaaaacaaagtcatccagatcattatctttctcagtcattgcctgatccaccatcaatcctttgcgcttacgatccttttgaatgaaaattcttgtaactttggaacaaacaaacattaaagattcaagttgaagcatggaaaataaattgatccaaatgctattatttgcaaagcctctctgctagctatattgatagagatagcttcttataggtgcaaaagagtgattggtcagacgtcatgtggtggatggcatcactatccagaaaccagctcttgctctaacacagcataatctgcaaagacgaaagataagttctaagaaaacaaagtaccatcaagatcattatttttttcagtcattgccagattcaccagtcctttgcgcttacgatccttttgacttgggcaattggcaacaaagtgtccaaacatttgttgcatcgaatgttcatgtacttgactcgtcaccaaattccattcgtttcctgctttttgccttttgttgaatgtcctcctagctactcaagcgaccaacgtcatgcccttcgatgcatctttttctgagaagatgtcgcttaaggctggtgtagtgatgaatgctggcaatgacttgatccaagtctgatcgaaggcgattcattacttctcatgtagagcaagaatgagagctcccgttgcatcagaaaatgacgatttcatattggttgtcaccggagtgccgtcatttggtcgatgtagtcttgcacctttcgtgaccctggcaacaattctgctcatctccgtagcccatgattgctcacaatagaattgttgaagcgcacaccaagcccccgctgcagtctgagaattcttgatcttgaggatgtcctctaattgaacatgctcaatcaacatagctcaaaatcctcatgccactgctccacaatcatcctcgcgacttcttctataggaagaatcgctggcatttgctcgcgtcccctaaccactcccagaatctccctctttgagaacttggcctctataatcgagaaccgtctaaacgagcaccattctccaagcaaacactactcgcctcgctttccaccatttccagcgttcctctagctcgtttgcgagggtaagagcgtccaccatgcagtgctcggccaggggctggtttcagctgcgcaatctctaagtattgacacagtttgattgacttgtcaaatgaatattaggaaatccaaaaccttcgatctgagcgacgctagaaaacaaatcgacaaagaacatgtcggagaactcttaaagcgcacgacttacattcgcgtgtcaccaaaatacaaaaccaaaggtccactgaggtttttacatggaaaggatacgcatctcggcaaaaaaaaaaaaaaaagaatactgaactccaaccttcttagacattaagctgctccaccatattatccttgaagtagatatcatgctctttggtgatagcaacaccgtagcgcgcacctggaggccacgagatggccttgttcatccgtggataggccacatgcccagccaagccggcccaatcaaagtcgacaatcttggcatcatacttgggatatccatcggcttcaactgtttgggactcacggaggaggatattgcaaagcctgaaatcaccgtggacaaagcctttggagtgaccaacatcgagtgccaccgcgatgcactcagtcagcttaacaacgtgccccgcatcaccctttacattcttcacaacttcatcagcgggaatccagcccttctctcgagtcaagtactccatcctgatcatcctcaccccatgcttctcaaaaacgtcactgcggagctctggtgcatacggtaaccatgccttgtgtgcgtccaagctgtacttggatacaaacttggccacctccggctcgccctgactgttctcgtagcgaaatacaagcttgccctccgccagctggtgcacagaagtctccttggctatcggccatggtattggtggcgactgtagtggtaccaccttgtagccctgcacgaagtgatggattgccctccatatccttgctgtggctaccaggtattcttcagggctgtagcacttggtctcggcaaaaggttccgcccaaaccctgccattgtcgacagtagctccccacacctccaaacgaggccccaagagacatatctccaaagcatacgaccgacttggttgtaatccaccgtacaaagtgcgtgccctgaggtagccatccagcacctggaagtccggatcgccagcgttgcctgcttgcgacttgaattcaaaaacaaggcgaatggacgtggccgtgtgttgaatgccgtccagttgaactcgtccctgtagcgtgaagtacggtgtgacaatcgcctccaggtagcggctgacgagtccctgaagcatcgactgaacctcctcctcgtgacattccacatacttgtcactctgcacccatttgcagaattcctccgcaaagtcggaagttagacaatgtccacaccacttcgtgcatgatgcaacgcttggaccaaaagcccactctctctttgatgcaatgccggagaggaactcggtaagctggaatgctttgttgtctggctttggaaactgtggtgagatcaaaacaggccatttacaatatgatgcttggaacattatctaattacttggaatgctttgattgcattactcgtagcaaactcccaatttgacgaagccaaggagttgttttctcgcatgcccgagcgcgatttgatgacctggaacattatgattaatgtgtatggccaagaagaaaactttaaagaagcaaaatttgtgtttgacatgatgccggaggccgagcttacatcttggaacagcttgaggatctcgcagaacatgtgtttacgtctatgccttttctcgacaccatttcatggacgatgatggtggccggctacattcgtgttgaaaagttggacaaggccaagcaagttttgaataggatgccacaacttgatgtcgtggcttggactacttggttctctctgcgtatgccatggttggagatctggagatactgaggcaaagctttgatgagctacatttgcaaaaagatatagcggtgtggattgccttgttatctgcgtacgtacggcgtggctgtctcgatgaagctaagaatactttcactcaaatgcctgaaaggagttcaatctgctgggcgatgatgatcactgcgtgtgcccaaaacaggcatttggaagatgcattctcgctgttcttagaagttccggagaatatcttgtgtgtttggaatgcaatgcttgtggcatatgctcagatgagttcgatatttcgtttggagcagttctttcaggatatgcccgagcgaagtgtagtttcatggggcgtgatgatagccaagttttctctcgccggtgacatactcgaggcattccaagtttttgaccatatgaagatggtggatttgcccgacgaggcttgtttcgtgtcgctgctaatcgcgtgtagccacgaaggtgaagtctatcgagggagaagtttgttcgcgtctatggtggaagattatggaatcacacccacgagacagcactactgctgcatggttgatttgctagcccgcgccaagcgtttggagcacgcgaaagagctccttagtaccatgccatttgaagataaatcattcggctggacatcagttataagtgctccattgtaaagggtttaagggtgcaacttattaggtcatggcaaagcttggaacgacgagatgtggtgcaaggtacgctccttacgaaaccagcgatagcaaaagcaagaactaccaggtggcggagagtgtgagcaggctgaggcacgctctcgtttatgacaatggaaaagtgttgcatgtatgggatatggaaagaggatttttcaactacaagctaccatatccatcccagatcaagggtcatctttgcggagtcgcgggtggaattctcttcttcaaggagaacagcaacactcaaaccatctttgcttggaacccagtgactggattcgtaagagagattaatcttccatcggtggagtcagagtttctagtcattgtcacgcccaagtcacacaggctctgcaagctcaacccgagcctcaagctcaacccgagcctcaagctcgaggcagtgggtgctcccccggtggaggactggacgcggatttgctacttgggcgagaggttcaatggagactcgggcatcaagctcgagtgctcgcggcatctgatgtatgctaatgtcctgggcacgagctcgctgcaacagctggatgttttggaagcgacaggaaatccagttagaacaattagctctcccaggccgatcaaggggcgaagctttcatcttccaccaagtgctgggagcgtcaagtatcgcttctttcagctggaacacggcgtgtttgtgtgtgtttcgatggagaggcgcttgcatttccaaggttgcgtgagaatctggctgtacaagcctggtcgtcatggtggtgtaaagaatcgaaaaggatcgtgtcatgcgtgccgtgttgcaaagacggtccacggaagtcacctcgctatggaagaattttgtgtctgcagcaacaacgaggactgggaggacgtatcaaagttgccagacaagtacgtgcatgggttgttgaaagagtcaatctcgcaggacgattgtgccggctggtttgcgtttgcgatggccaacattgtcttggtggcatttgtttccaagagtggcgacttgagctcttgcaaggaggtgtttcgcttcgagctggcgttgagagagtggagccgcatggcaaatccattcagaagctctcggggtgttaactggaacaacatgggctgctggtgtccaagtttttccaatctggacatggattgggggtggtgtgcttgatcgatcaagtagttcatagaagatcctggagtgatacagttctccttgtgacggaaaatcttacatcatattaatatacaactacaacttaccctgtggttcatcttcctcaaagtcaagctctgaacaatagacaaaccctctacttgggcttctcacgaacccaaactgctcaaatccaaaacggcgccaatcctcctctccaaacattatagcaacatgaagttgcggaatttggtccacaactactttggactcaggggcttggtcttgttgagttcgaccagcacttgagattctgtaataatgtcgtccactggttgcctcacccagcagtaatcacctctcaagatgaaaatatccttgctcgaaagaataccgatagccactcccgatttccaccaagccgaagtctcgaccgctgcctactggcacagacgggttggatcgatcaggatgctccaaattgatcagcttcttccaatcctagggatccaacgccaaacaacaccactcaccctcaatgcagatcatggaagtcagcactaagtttctgctaaagagtttgtgaatcggaccccagcgtccgactcttgaatcaaagtgaaatcccgctaggaagattctgaagtctaacttgccgctgaccttgtcctagaagctgagcattgccctcccggttccatcaccagaactaccaccatcagaaccatgtaataatacgttgctgtgggcgttgctggaatggtaacccattgcttcgtcactggattcccaactagaaactcaccatcatggcctggactggagcacaaaaccaaacaacctccagccattataaatcattcacaccaagccgatcgtgcttggaatgatcacctcctgttgaagctgtacgatcttaaagttggggattgatcatgtcttggcatgcaactggcaagactgaaacgggccctagaaggcctagacgcccaaaccttgcgttgcgcaacatcgcactgccaaacgcgctagtatatcttcaacaacaccctctggaagatactgcagacgaatcctaagcaacactacttcaatgagagctgttggctcgaagtttggaagatgagttatccttctccatcgccatgagcaaaacagcataattattgtgtttgatccaatgtaaattgaggcaaaagccttcgattaaacaacacataagcagctcctcctttggggtccaagctgaaaagatctctcactccttctaccccgtcatggatgttattccacgaacaacttccaagaaaacatctcaagtgtaaagcatctggcacaaaaggcatgcttgcgatgagatcttgagcagcacacaaatgcccagcacggctcaaaccatcgatcacgcagcaatagtgttgctttcctggatcaaggccaaagtcgaggatcatagagctaaagcagctcttgcaatcgtccacactgcctccacgactgcatgctatgagagcagacacgaaagagacttcgtccaccagatctagtgttttcatcgtatcaaacatttccaatgcacgagtggagtcgctgctgctggtgagaccagccaaaacagtgctccaagttatcacgccgcactctggagtagcgtagaaacctttgacagctctctcaacttgtccactcttgacataagaaaacagaaggacattccaggataccaagttcttgaatggcatgctatcaaacaaggccttggttttgttggtatgcccggcctgggcatatatagacaacataatgttccacactggttgatctttccatggaattgatataaaaaacttctcagcgtcatcgacatgtgcatcccgggaatatgcagcgagaacacatgttgatgatgaagggtcgtgttctggcatcaaatcaaaagcgttcttcgtttcctcaattttcccagattgggcatatacatctagcattgagttccaggatattatacttctttctgtcattctttcaaacagatctctagctgggagaagctttcctctttgcgtgtaggctgttagcattgtgttccaggctatgaggtctcgatctggcattttattgaagaactcccgagctctttcgacattttcactctgcacaagcgacatgagcattgtattacacgaaatcacgtccagaaacggcatttctcgaaatatacaagcagcgttttccagatgacctctttgagaataggctgccagaatggcattccacgacaccaagttcttttctggcatccaatcgaatatttctctcgcatcctcgactctacccctgtgaatataagctgaaagcatggcattttgagagatcaagtcatgctgcggcattctagcaaagtaatcctttgccttctccggataccctcgctgggcatatgctgtcagcatagacgtccatgaggcactgtttgcctctggcatttcatcaaaaactttttctgcccgggtcaaatctccatactgtgtgtatgttgcgagcatggtgttccagactatcaaatctctctgtggcattctatgatagagactttctgccgcttccaagaagccattctcgctatatgcggctaacatggttgatagagagatcaagttgacgaactccatctcttcaagcatcttttgtgcatggagtgtttttccactgttgctgtatgcagatagcatcgcattgcagcagattatgtcgtgcatcggcatttgggaaaagatctcctcactagctctgacttctccatttcgagcataagcaacagccaaacttgtccaggagatcaaacagtgaagaggcattgcatcaaaatgagcttttgccatgtcaagatgcccttgatgggcatatgacgcaagaatcatgttgaaggaagaaagagttttttgcggcattgattcaaagaattccaaggcatcgttcgcacgaccaacgccaatgtaggcattcagcatggaattccagaccacggcatccttgcaaggcatcttatcaaaggtattcttcgcatcttccagatgcccatttcgagcatatgccaaaagcataaagctccacgagaaggaatcctttggatggagcgcgtcaaaggcctctcgagcatccttgacacatccaagccttccatagagctcgaccatcttattcttaaagattctccctccatagccgctcgcattcttgatggattcgtggatcacccgggcagtagcgagcgatttgcagtgttggatttgctggaggagatcggagctcgcgattgaatggctgcccacttgatgatccagcttgaaagactatgaactagggcgatggattgatctccaggatggactactggcggttgaatggtcgcccacgcccaatcactccggggattccgagaaaccgggcactttgcccagctcctgaaatcctgcgaggatctctgccatggccgatggattcacggcgagatccggcgcagcgatcacgcaaccaacctcttcctcgccaacaatctcatccagatgtatggccgccatggcagccttgccgacgcccacgccgtctttgacgagatccgcgagcctaatgtctactcttggaacatcctcgcgcaggcctatctcctcgccggaaacacaagagaggcgaaagccctcttcgatcaaatgcccgtaagggatgccgtgtcctggaccgcattgcttgtgacaaatgcccagcaagggtatcttggaaacgccttggatctcttccatgaaatgcctaccagagatctcgtggcctggaacgccatgatacacgccatagcagagcatggaagcttggacgaagcattagcaatgttccagaaaatgccacagtggaatttctcctcgtggaactctttaatcgcagcatttgccaagagagggcatctaggttccgcaaaggaggccttcgattccatgccggcgcgcaacgatgtgtcttgggcgaccatggtggctgctatggcttccatcgatcgctcattggacgatgccagatcctgcttccatctcatgccgcagcacgatctagtctcctcctctgcgatggcggtcgcctttgaccgtaatggagatctctccctcgcgaagaagatcatggattccacgcccgagcagagcgccgcgagctggaacgcttacctcgaatctctctggcagcgcggagatgtcaccgcagtagacgcggcattcgcagagatcgcccagcgcgatgagatcagctggacgatcctgctcaaaacgcatcgcgaggatctgggcgaggcggaatcgatccacgcgcgcatgccgagctgcaatgcggtgtcgtccacgctcatgatctcggcctacgcggagcacgggcacctggaagaagcgattcgcgaattcgattccatgcccgatcgatcgatcgtgtcgtggaacgcgatgatccgggcattcgtggattgtggcgagagcttgcaggaggctaagcgcgtgtttgatatgatgcccacgcgggacattgtctcgtggaactccatagcccaggcatattccgatcgagggtatctgagcgagggaagattcctctttgcgatcatgccagcgtggaataccatcacttggacggtcctgatttgtgcaaatgccgagaacgggtatattgagcaagcacgcagagtgtttacttccgtacaaaacgagagcgttgtcacgtccacggcgatgatcaaagcgtacggaataaatggctatgacgcgaaggcttggagggtgttcattgagatgagagagagaaatgtggtgtcttggactgctttgattggagcaaatgccttgtgtggtcatttggatgaggcaaagttggtttttagcaagatgccttgttgggatttggtctcgttcgattgcatgcttggagctcatgcgaaccagctcgaggtcgagaagtgtgtggagatttttgaaactatgacttcccggagcatcatctcctggaacgctttgcttgctgcgtatgcgctggatagtctcgtggagctcaccaagtggacgttctccaag

SEQ ID NO: 14848 - DNA, 4323 bp, Selaginella moellendorffii
  Intron number 1 from transcript 420004 (locus 420004) deri ved from phytozome v7.0 (chr-ID scaffold_44; pos 1239894 t o 1244216 reverse strand)
cttttgcgaatgttagcaacgtctccgagttattgaagaatcctgatagcgagttttccaacaagattttacattatagattctttgctttttcttctttcgatacatgctcttcttttgcaggtctcagcatccacaagaaatagatataagggtggaaattaaaagatgtttaataaaactccctttacccaaaactttaaacacacatttcatcccttaagcttgtaaaaaaggacatattttaggttttcacttgttgagaagccagcagcgatgccaaacaaaagcagcaaggtgtacaaagagctccatcttctccagaactacccactgttttggtcttcgtcctcccagcagagtagcctccagtttggaagcgtggatgagctgaaatcgtacctgaaacagcagcacccgacctgtatgaagtgcaatcgtggtgagtgtggcaacttcgactacttcaataacgacaacattggccagccaaggtatcgctgcagtcagtgcaagaaaaaattcacttatagcggaaaaacaagaccaacctacatgaagcggccaagatcaagcagcactggggaagctggcatggcacatgagaagaagaagctcaagcgcgctccatttgaagacaagagggagaagggttcgctggtccacgaaagtcaagcgaagcagagtggtcaacaggctgatggggcggtgatccaggacatggaagattttgacatggatgacctggaggtggctagaatcatggcactggtcgaggagaatgaagtcccaaatgaggaggaagacatccctcttgtgttccctgaggtggcagaaattgtagtgagtgacaaagagatgactgaaattctgtcgtcaaatctcgaggatgtggatgatgaggagatgctaaatctcgtgcttgaggatgttttggtgcagccacaacacaaggagggcttggcagaaattcaaattggcaatggggaaacgagccaaatcctccaaaggaatgtggacaatgaggatcttgtgcttgagggggattctcaggaggagcaggcagaggcaatggagggggacatttattttgctctcgagcttgaacaggatcttcaggccgaagaagataagcgaaaggaggaatccatgatgctctggaagattgaattggagaaagctaaatggagtgatatgtttaatttcaaaactaatccgcaaggtagtattcttggttgattgaatcaacaacaaaatcaacacaatcaggatagaaaaaaaaaaaaacaaatacttccatgtttagtgtaaaatttattaatagtattagatcgaaataccacttttttgaattaaagatgatgttcacaacaagaatttttcactggtcctgaaatcggggggcatgtatcaaaaccttgtttccagatctgatgtgacagcggcaggatcgggtccttggccttcttttccgcaatgctccaaacgcattggggccatggttaccattttcttgcataattactgctcggttttccttgtcagtgctatgaacgtcggccttgctcttgtcctgctttggagatatggccatcgaggcctctcaactctggcatataaagactgcgacagcgaatggggaatcgttgctccaagagcttgaaaggccgagaaagcagctatgcgcgtctcttctgctcgatccaggacaattctccctgctccgttgcagcatacatccataccagcatctatcacaacaagcttgcgagtaaaagcattcggtatataagagaaacaaacctacatgttctttgaatgaagaatcgcacagtgcgtttgcaaattcaggaattgtagcctcagcgaactgccaaacgctgcttttcctaatggagttatttttttagatctgtaactcctgatcccactctatcagtcgcttgtggcacagaaaagaatcttgagcagacttcacgacgtcatcaaaaggctgtgtagagttgagaagggtacctccaaaacgagctctcatcattccattcttttcctcggcgagacatgactgcaacggttgacaaccttctttcagaacgggaagctcctcacttttacagattaatatctgcaaaaccaacattcggcaaatttcagaatacataaacgagacaagtcttacactctcgccatgcgtgtctatccctgctcttcctgctctcccagccatttgcctgtatctcgtcgggcagtggtttcgcaggcatgacgacttgaacaaaacaaaagcacagaatggccttactaaccacaccacctagacaacaaagagcacaaactgaaatcagtaagacctatgaaaggtctttgtcaaaacacaaaagtaacctcatggcacagatggacgatgtgatctggatccttgccgctaagttcagagcctgcttttagagcacgaacagtattcatactagtcgtctaaagggaccaggcgaaagttagtctcataaaatgcagcctgcaaattatcatcatggtctgtaagacttgaataaaagattgcaatacctgaagccatgatgcaacggctgctacattaggcatcgctgcactcattcctataatttgcaacctcgtggggctgctgctttcatagtcacctttaccggccccatatcgtagcttagttctagcaaataacctctctctttatctccaacctgcaccagactgttataagaaagatattgggaagtcagtatacataccatatgaacctcatctataactacgactgctagttcggacagccgcccgtcctctaccaccttattgatgagtgagttcgctttttgatgctacgaactgcaagtgaagtatctggaggtagcgctttactcccgtgagtcccaaaatatccacggacacaacatgttccagtaccgcctctaaatgctctgtctagcaaagtaaaaaccagttgacgtttttgacaaaacaaaaccaagcataccttctcagaacacaacgcgacatatggtaaaaccagcattgccattttccctgtcgccaccactctttttaacatcaaaatttctgcaacaagactctttcctgcactgtcaaaaagttttaaggattaccataaaagaaaactaaataagaaatctcaagcaccttgttgaggcacagtaaacaagacttttaccatccaaaactccatcaaggcgtagacaatcaacctgtagtttcttgtaagtaggcactaaaatcacaaacagttggcttacctgccattgatacagtcttctaacccctttccgaaagtatccttcacataattcagccggaagccaatcggacaacttctcaccggagactgaggacgacggattcttcagtgggagctgcaacagcttctttgccaacgttgtcatgactcgcaaagtcggagagttcaataaattcgggccgtcaacccttcttgctcccaaggacgcgtattgcctcgtcccagaagctatctactggtgatacatacttgttgtcgagtagccagttcggagtgggatcgccaccatttccagcgcttgcatgaggagtgcatggtagcttcttcgcactgtgctgaaagggcggtaattttctgtcagccacttcaaccatttcagccgtcgttgcaccgagaggaatcgccatctcgcttctcaaagctttgcttggagagacgtccatcttctcgctcttctcttgcaaaacatctctagaggtagctgctaccttttttgtcggggaaacaccactgaaacaaaacacaggcatcagcaaaaaagaatgaaaggaaaaagatcatcgtcacttactggagacagatcgccaggatttcttctcgtttgctttcttgtccctctaacaatgcactgaaagtagtgagcttaagcattcggtgtacagccccgacgttgcatgtcctctaagagatccaaggccacctggccttcaccgtttcccgcgtagcccagcaccagcgccgtccaggacacgacatcgtgcagtggcatcttgtcaaaaactctgcgagcatctgccgagctcccacatttgacgtagaatccaccagcgtgtttgcgaccaaatactccaactcgagaccacctttagcagcttcggcgtgtatagccattcctctctccagtgagcgaacttttccttcacgtttccccgaaagtcgcacagcctcctcttttgatgccagacttgtgcaagctgaagctgaagctggattcgttgcccatgaagacataaagatcgaaactaataacacca

SEQ ID NO: 14849 - DNA, 10707 bp, Selaginella moellendorffii
  Intron number 3 from transcript 138417 (locus 138417) deri ved from phytozome v7.0 (chr-ID scaffold_209; pos 53168 to 63874 reverse strand)
tttatattctggacacaggtacatacatggtgctggttttaaacttgcgaattcatttgcgtttccagaaacaatggcatggcgggaggtaaagacgactggtgcggagctaatgctaagagccgggcacacaacaatcagccatggaaagtatctcgtcgtgtttggaggattctcctatgatcacaagctattcaatgacgtccatactctcgacttaagtacgtgagtctctcatggggcttttacgtattttgtagcgactggtgtttgggcagcttcgaatccctctggtcccgggccttctccacgtttctcccttgcaggagattccgtggacgcagagcgaggcatatgattcttctatgggggatgtaacgaagagcttgaagctctggatgatatgtattttctcggcacaggttggcttcttcttttattgacattgctgccattcttgacaatatggttgccgtttttctgtgaagagatgctgagggagaaagatccatcagaaccaaagctatccatgcgtaaggaacttaagagaaggcggcaagagtatcatgccacgccattcgtgctagacaagcaacgggatgcagacaagagcttggtttcatctcacggaggtatctgcagaaaaacttggatctctccaattttccctgtcaaactcatgctacatagtttcaagctcatgttcagccgctaggcgagaagatgttcgaggctaaagtaagcgacatattcaactacggatacacgttagaagcgtccatcaatgggaagcttttccatgggctgctcttctcatacaagcctggctttgctcaggcagtgcaatcttacatggcgagatttgttttgtttgatcctcagttactctctaacgccaggaaggaaaacatcacaggaggaaacgtttctaactgtcctctacattttatatgggaaagactccagtcttgacatggaagagactttctccttctactacattgtcaaccaaggcattcaggctctccccatcaacttcctcggcactgcctacaacaaagccatatgcgttgtacatagctttgtgacgttttctcattttcaggccgaggcaaaagctcatcaagcttatccaggacgtgatcaaccagcgcttctggaaacccgcaggaagcaagcattctttcgttgctcatggatcagctggatgacaaaaaagaggtgctggaagacgctcatatcatagacatgctcaacatgtacatgaacgctggtcacaactcaacagctcatgtcatcatgtggctgatttcctaaagaaaaatccatgatgtgcttgagaaagtgaagataaacatttccaatttcatacaaactttccttcatacaaaatttcttctttaggccacatccagactattctgtaagagtttcaaaacttctgtaattaaaaaagaaaaaagtattctactgaattgtacctcatactagatgatatgctatgtcctccactgttctaattcatctctgtcgcttctgtatttcgaaggaaacactatttataaaaactctgcatttatggttacccttttctccaatggacctaatgacgacatgttcaagacagagtcaaactggtaggtattcttaaagaaccatagaactgaacaccatctctttaagggcaatttatgaggcgcttgtgaggctctgaagtgttaacctcctctggatatctttcaataatgagaaaaaacctttaaactatgaaaggtactttttcactgcttctttcatgttttatggagtcaagttacagcttctggaattctatgagcagcatctgaggaatgtctagggaatgagaaatagtaaggtgtagtatgatattttcttgttctaataaatagttaaataggagtacattgtactgcctgttgtagcctttgtggctttgcttgactacaaaacaatgcttacaaagacagaattacacaagcagagatttcataaaaaaaagtcagtctcttgccacttcactctcaaacaatgaaagcaaataatgaatcacccaagacaaaatgtggaagaagaatagaattggattcatcacctttgcgaatacccagacagacacatatccttgcaagaggaagagatctaacatcagttgcattgcttgacactagattcaggagcctccttagaatggcttgtggtggcagggagcatagaaacatgagtttgggccacaaaggtcaccatttcaatcttattatgaaagggtccttaacaaatgtgttacaatccactgctgcaaaaactaacatcataaattcgtgcaaataatggtatcctaagatcacaatctcctatttcaatagtccaagctaacacattattgcaaatgtgaaaagatgagaccttgtagtaagtagaaaaataagaagttgatagttggcctaaagaaggattttagagaaaaaacatataatggatttggcatttgaagcaagaaagaataaggaaggttgctaatcttatgaaaaacatagtagtatttatattggaaagtaatttgttttctgttatttagagaaatctttggtgatgtatatattccaaacatgcaattcttatggatatctcaaaaatatcattatttttgtagaaaacactactcttgaagacttaagaaactacaagaaaaagctttgctagcttcttcttggatatgaaagaaaaaattgagctaccttctgcagttccataagctaaggagtccttgctggtacatccaagcacatgaagttccttgggtgttaagtcttatcaagtggtgggctattcaatgagcacgataaaaattaaaaatagattgagaaaaaggagaaacaacatatcttacaaatagcagataggtttaagaaaaaaaaaagttagaatttatgctagggtcctcccctgattaatttaaatgatgatattaaaaaatatcacaataatccagataaattcaaataatacagctttttaattattgataatgtagatactgaatagttctattactaatgcagtaatattaatggcatgcattggaaattgggattagagcagtaataaaaaatggaaatttgtcacacataatgacattctaacacttctatgacaatacagatttaattctggtaagcaaagaaaatccattatatcattcaccattatagtgttcagaaaatagtaataatgtcaataataagcactattttattatcccatgataataataaaacttttattatcccatgataataataaaacaaaatgagaacattatatatatatatatatatatatatatatatatatatatatatacctcttgcaattactctctggaagagttatttacaataataaggttttcagaaaaacttttagcacatcaaggatgaagagttaaaggaaaaagaaatagcaaaattaaatatccaggtaaaattaaaagtaggagatatagcatacctaagataaatacatcttcttttctaattttacaatgttagaaattttaattgtatacaaggttaaatttatcttaattttgctactcttcacctctaaagaaatgcacaataatgcaaatagattaaaaaattaattttaatatgtacatattaatgttatctccatgtttatatttaaaacattaatatttttatataatatattaatctgcaatcatattcttctttatataattgctgaagagtaagtagtgtgtaatcattcaatagtaatgtttttataaattggaatgtatagttttgttataaagcattagtagagatttgtcttaatacaattatatctctaatataattattatctttggatgtacctcttttcaaacacctctaatgtagtgtgaatatctagatagatttacttatgtttatttgtaaatataaatcaagacacataatagaaattcttttgttctttattagactatgaaagttaaaggcagcattatagttcagataaataaaaaaaaaagcttagtatgtaatcaaaaaataatttccccaaacctttttttttggcagtatataattctttggttttgtgaaaaatcaattgattttaaatcatggcatcaatcttgtagacatgtttaggtttttgtatctttttataaaggcaataaaaaaattcaaatttaaatttagtgatgatgaaaaaatgatattatgttttccaaaacttgcattttttatctatttgcattgttctgcatttctttagaggtgaagagtagcaaaattaagataaatttaaccttgtatacaatcaaaatttctaacattgtaaaattaaaatagaagatgtatttattttaggtatgctatatttcccagcggagctggggtctctgatagtacccccttatttaaacatgctattggcatatggcatccggcatcttttattccatttttagaatattatttctgaatatacttataatctaacagctcaaattcaaaaacttcaaatagatggcatagatcaagtgccaaaggggtggcaacgcttcaactttgaattgaatgaccctccaaatcaagtgaatcttttaggactcaggcagattgtaagctgcaatctctctctctctctctctctctctctctctctctctctctctctctctctctctctctctctctctctctctctctctcgggtggtgaacacagcagcaggagtgtgcgtaccctttgcaaaaggctggattgttgattgttcattgccattcgcaacagatgcacaggtcaatggcggacagtctgaagaacacaatctccagctccgtgatgacttccccactggctgatgctcccggatttctcaccctgtcacaccaagggcttgcgacaagattcccagcatgcgtatggctgatctctcatttctcttgatctctaatgctaacttggtttttgttgcgcaggagcaagtaacagagggctgttgggagttcaagattttttttcttttgcttgtgtccagacaaccaatgacctttgggctaaacactctaaagtcgtttatctaaactctcaggatgctattagaaaggttcataagcctatgtttagtctaatgacttctccagttttcttgtttgttttaaatgcagattcaaattagtggcgagaaactgactccaccattttcagcctgtcaaatctcttgattttggtgacacaggaaggtgagttttttcatagtcgtttcttatttatgggattaaaaagcctctttgtgatgcaagtgtacaatccctcctgttcgccatgttgtgtgtgtcatacagtcttgtcaaaggaaaaatatttatacccactcagtggtcatgtcattgtttgatatgactttggaagatcaagagactgtgaattttatggtacgttttctctttcttgtgttgttcttgttgacgatttctttaggccagagatatgcggcgaggtttggaggtgacagtgttgtcaagacatgatgcagctgcagacctgcttcagatgtatgcatattctcagtgcttctttacatgtgcatattttactgcctcttattatgtacaacaaggagtacgtgcttgggcagctcatatatgatcaagcaacaaagagactgcctggtgctcctggatctctcatcctgtcacgccaagggcttgcaacaagattcccagcatgcatatggatctaggttttagcatgatctctcatttctcttgatctctgtggctaacttgattcttgttgtgcaggagcgagtaacagagggctgtttgggagttcaagaattttttttcttttgctcgtgtccagacaaccaacaaccttcgggctaaacactctaaagtcgtttatctaaactcttgggatgctattagaaagattcatgagcgcatgtttagtctgatgacttctccagttttcttgcttgttttaaatgcagattcaaactagtggcgagaaactgactccaccattttcggcctgtcaaatctcttggttgtggtaacacaggaaggtgagttttttcatagtcgtttcttatatatgggatgaaaaagcctttttgtgatgcaagtgtacatttagtagagttgaaaggttcctgccagtattttgccatgaagagcacggataagagcgtcataatcagcagaaacaatgtgatatttctgacttaaaacttgcactgatcttttgaacaggttaattgcgcatgtgctgaaagagagattcggggattgatcttgctttctaaattgactttttccttgcagattgtgactcatgtttgcttagcaataaacttttatcctgcaggggaactcttcaaatggagaaacaaccactaaaattcgttgatcaagctctccaaaccagtgtacaggtagcattttctcttttttttgttttgtacttgtaagatccaggggattgatcttgctttctaaattgaccttttccttgcagattgcgactcatgtttgcttagcaataaacttttatcctgcaggggaactcttcaaatggagaaacaaccactaaaatacgttgatcaagctctccaaaccagtgtacaggtagcatttttctttgttttgttttgtacttgtaagatccagttttaactgagttttttctcttttccctccaattgcagcggattgccatgagcatcaagggcagagcctaggatctgcgttggctggctctgggatcacattgcctctgggcacatttagtttatgggactatgatggcaactgtatgttagaatcaaacaaattgcaaagttcacatttctgatgtcgtggttgaaggggatgttatttcctctaatcacttatcacaatattagaaaagattattacaatgtcacaatattaccttaaaaagctgtggtaaacctctttactgtcaaaggctttttgagagtgtaactaatagacacgtaggttaagaaaaactgtttcgaatcatagaaaaaagaactacacaattaggttgccttatgcatttgtcaagaggtaattttgtttctgtgttctctgagagataattagaaagtcctaagggcaacattcagtgtgcttctattttcttgtggtctggctatttgtctatttacttattatcaccatctagagcctgcacacgctgtctaagcttctatttctaaaagagattgtaaaatctcctatagatcaatgggtggcaaaagaaagaggaaaacatgtgatctaattttacatgaaggctgtataataaaaagaagttcagcaagcttgaattcatctttatggcgacctttgtgacaatgctagatgcttgctggagactggatcagacgagagtgatccacgaagctgtgagagatagtggcgtggagatcgacaaggtcttggggagagctcttatgaacgcatacagggcctgtggaagcctggacgaagtgagacaagcttttgatcaagtctctttctcttccggtggctacagtgctcttctttggaatgggctgctgtcctctttctcttgctgtgacgacgatcgctcggctgccagagtattcattcatatgcaactccagggagtgaaatcggacaagctgacactcatctcggcgttggattcttgcgtaactctctcgaatctcaagatcttacagaacacatcgtttagtaaattctctggatcacttaggggtcatcttatttatttccttcttcccttctcatgacggatcaccactaaacaacttgtaaggatccaagatctattctgagggtgacaggaagtgtatgaattggtgtaaaaaaaattgaaaaacgtgtgttctaggaattaacacgatggtaagccctattgtttcagttatttttttgtaaaaggaatacggggaatttaatgacatggggaaacccatgacaccgtgaacacggaatcccacccgtttccaatcacagccatattacgattcatcttgtaagagagctgaaaggaccacaactgcagcgagcctccagctcccaggctgctgacagcaacaacagcagcaagtccatcgagcgatgcctagatgagaactgtgagtctggcaccaatgagtagaagcgatgcgtttggacacacctccacaacttggtgtgtgtagctcacattgtgggagatgtagtcgaggtctggttggaataggtggagaggcaagagctcagacttgtaagtgacgtccttggtagctctccaaacaggatccaattgacacatgtgtttgcctgggtggaggtgccccggaacacaaccataaggtgtttgttagcggaggtggtgtcttccttgtacactggaccccaagctttggagtctgaggagggctcaagtgttggaagtttggggatggcttccagctggggatggaggcaggcatccataggttttggtggagattgtggtgagtggggagatgaagagtgccagacacttaagatcatgctgtgagagcttggagacttcgtcccacacttccagagcttctttgcttgttgggttttgtttggctgaacggtgttggtgatggcgggctagaaaaacaatggcaggcacaaccaaaagcaagagcaggagagtgcaagccatgcatttgtgatttttcttcatggtttggaaggaatcttacctctgttctccctgcgggtttgaaaattaaagagtcaccaggtctcatgtatctgtgttgccttcgtcaaagatttacaaaagtccaactctttttcactttatatggtctggctctttcttgcattataataatctggatttcttaactctcaaattttcaagtatgcacaacaggaaactaaaattcacagatctcacttatcagcattgctttggtcaaaaagttatattttatggcctaacactattatgtcttagattttgcatttctttttctcttttagcagtttcttaacatcaaatgctttgtgatcaaaagagagcatgcaagaagttcctctgcaagtagaacccccaggctgactttgatgtgttccaaaggcaatgactctgaactcaatatccatgttgagtagaataaagctgcttgggtcctcattaaacttccaccacctctcttcaatttcttcttgccactttacagtaagtcactgaaaaaatctaagattctgtagaacttcactggttaaaacttggacaggaaatctagaataaaaagcaagcctttgaacacttctgtttttatcttcctttgatttaaaaccaagtgggttatgctagaacaccctcccttgatatcaagatttcaagtagatgttgtaacttttaattatggatatcatatgttccatctctaggatgatgaatttagaaaggcatttgctttcatttcaagcacaaaacttgtaaaataaaagaagccagttttgattaattacaaagcctttctttctagagcttacaactataactttcaactgattattttaaaattaatattaaaatgcttactcttgacgctaaaatgcttaaaaattcaatgtgcccaaaatattttgtacttctctcagcggagctgggatcccagctagtcaaactctttatttaaagttgctattttggcatcggcgtcacatattctattttaagaatatccatttttacttatggtagatactattaatctgactgtccaaatctgtgacgattgatatagacggccaagatggcaatatgggaggtactgtttcaattctagatttgcaaccgctccatcgactgggagggaatgctttgcttaagtatgctttgcagattgatatgtagatggtacgtttcatttatcctatttctaaccctaggaagggatttgtctctgtttgtagagttcgtagaattaccgagttcgtgaagaaaagagtcacacttatggcaaaagtactcaactgagaatatcatctggtaaaagagtctcgacccccctatcgtcgtccctgcgattctaacttgagatgttccaggatgaccaagatattccggccaattgcagcaacggcggtgtcgagcctggtgagggaccaaaaaaactcctaccaaaagccgcaacctacatttgttccttatccaacacctttgagtgagttccttcgatttagacactagaaaaaactgtaacgcattcatttttagacagctccggaagaagtcctgggaacggcactggataacgatcctaagcggctgaaagtcccagcctattacaacgaggttgtgtttgtttctccatttgcaaaggtttgagaggctcacggctttctctgtgttgccatagttgtgctcgatggtcagcgagaacaggcttgatgccttccagacttacgctgggaaaaaaatcgctggcatccgcctgcgcaggtgcatttgacagatcgacgtgctctgctcggaaatgtgacgaggattgggagtgaaaggcgaacaggctatggtggatggagctcatgacagggacaacgtctcggacaacgaggggattcacgttgtcatcgacgactagaatcaaggttcttcactcttctggtgggatcgcgcaggg

SEQ ID NO: 14850 - DNA, 12840 bp, Selaginella moellendorffii
  Intron number 6 from transcript 227659 (locus 227659) deri ved from phytozome v7.0 (chr-ID scaffold_7; pos 2876773 to 2889612 reverse strand)
tttaccggagagattagaaacatcgggtctaccataaggacttcaatttgtgtcctggaaaatgaaacaagttcctgtttgtgtttattctctctctacagattactggctccaagtctttaggtgtgaaagaacttgcttgaagagactgagatctacactcccaaataaagaacccaccaaaaccaagaacaaaaactccaagagcacaagaatatcatgcttcatcaaagtcgcatagtctcaaagccttcaaccgaagcttaaatcgtccgggtgccgcacaagctagctcgatgttgctgtgtttctccagtccataattcacgatatcactcgagacacgtttggttgcctggtcagaaagttctcgaggaagactgaggctaaaaccaccaaaaatctcgaagactgtcacctgtggttttgatcttgatgcaaactcttctctccacgccaccaatcttccgctgctcacaaccctcctcacttgctcctcatcgaagccaaagtggcggtaccacgaaagcaccagcgcttgggacgcaggattgagcactgccagcggcggcgaccacggcgaaaatccttgcttctccgtgtctagcagctcgatctctggattgaagcgtctcatcgccgccagacccaagctatagatcctctcgctgttggccggtacgtgctcggctccaaatcccactgcaagaccgtgagagcctccaccaggctcacatctcgctccttggaggcctcgatgcaccacaagatcatccccagcacacggacaaggctgttgtctcttcgcacctggaagatcccacacggatacgcagctccagctcctgtgaactggaactctccactgtaaactggcaagaagttcctctcctctcctggagcgcacaccgagcaagccatgtcgtccaccatgatggtttgctccatgtccacctcgatcgccgtgggagatcccactgtgaatccgtccacccggtagagatggttctgcgagaagacactgcaatccttgaggcctcctgctgtgcatgctgggaaaatgtcggccaggaggcttgcaacgagcagcgggtttcgcgattccgggccgaagctgaagaagctgacgctcatacctgggatttggctgagcgcgagtagaaactcgcggcatccatgcagcggcgcgtaggaatcgccaccggcagagtgtttgccgccgcgatcgaggcgaacaagcgtccggtcgaggtccaagagcacctgcatgcacaataaccctagaatttttattattttaggatgttagacggcgagggatgagaagcaaagagctttgggcaagcctatgcccaacataagagagagacgaaaggagaaatggcaaaagaagcttctcatcgcccaccagacttctggagaaaagacccctcgttccaaatccattctcactcttccactggctggagttacacactgagcaatattcttcaaaatacccactcattatttttttcttgcctttgtcctttgaaaagaccttttcaactgtagcctctccgatcaccaatctgctagtttatattgatctcaacatggaatagatttagagattctcatcctgtaaacattttttcactgtagctaaatagaagttagatctaagtagggcaaatcatagtaaagcttgagaaatagagtgttaagggtacatgttttagggtttggaacagttccctcaattgtgaaaagacagaagactatgtattgtctacgttcttctaatgccaactttagttacaacccatttagttgccatgtaaatgatatcaacaatttaaaatttgaagtttaaaggaacaaaataattgtctaatgttgctgtttatgaattaagttgagtgtggtctgaatgttttttattttctagagaaaggaaaatcaaattattgaggcaaagagaaatgcaagtgaatgaaaactaaagccttatttcaaatcctaattaacacctaatatatgaataatttggtgaaaaaaaatttaatgaagaatttgtgagtgcatggaatatggaacgggaatacagaaatgtgcatatcaattagcccaaaaaccctagcttatatacaggagcgagtggtccggattgaaaccaatccgacggctaccaaaatcccactacgctaatattagtatacggcatcgtagccgtacacttggccctcacatcatcccctcctctcgaaataatgaaaggccgtcaaggttctcttgtagacgggccgggatctggaggaatgtcaggaggaggcatcggcggatctgtagacggtattaattgctcctgatccctttgtatgaagcgttttaactgctgcacatgcacaatctccagaggatcggcctgctgaacgtcatgccgaaccttataaacttgtggtccaacttgccgcaacacccgatacggtcctttccactacgcaaggagccccttagataaaccacataccgtaagatgaggaaaacggactaacaccaaatcatccactttgtactccataggtggacaatgatggtaattgtagcgcagttgttgtcccacttgtacgcggcctaagtgttcagcagactctgctcggacaagtggaagaatgcttgtcaaatattgatcccatgacctagtatcaggagctcatggcaatcgcaaaggtaaacccagctctgttggtaatattggatcatgaccatatagaagtttatatggtgaagcaccaatagaactctgcacccctgtgacataggcataccgaagagacggcaaataaccatcccaatccgaatgctgaaagttcacatacttcgcaatcatccctttgaatgtccgaacgagtcgttccaccagaccgtctgattgtggatgataagcactcgtaaaagtgtggcgtatccccaaccgagatgtcaaaacatgaaatacctcaaccataaatgcaggaccattatccgaaagaatccgctctggacaagaatgctggaacaccactcgattgaggaggaagtatccaacagcagttgcagaggcactagcaagagcaccaacttccacccaacgaatcaaatagtcagaagcaataataatatactcattgccagcagtcgatcgtggaaaaggtcccataagatcaaatgccaccaactcaaacggacgagaaactgcaattgactccaactgtccttccgtagcacaagggggagtattatgagcttggcaccaaacgcagctacgcacataccggataatatcacgtcgcatctctggccaatagaaagatctgcgcagcttctcagtgacacgacggtgtcccatatgcccacctagaacaagagaatcatggtaggcatggagaaaccgcggaataaacaccgaaggcaccaccagccgtaaatgatcatcaggatccgtctccataaaataaagaaggccatcttcaaggcgatattgagaatgtaaatgccggaaaggcaagtcatcagcaagtgatgcagaattctcaaacccatctcgaagccttcgaatccacggctcaatcttttgagcctcacgaacctcatcaagagaaggtagatcttgctctgcaccctgtggacactgaacgtcaaggacagcaactgccgacggcacagaatcctcatctagaaaatccacagatgctggaacaacaggttcgtcagaaacataagaagtgagtggagaaggaagaggagctcgataaagggcatcagcattagccatagaactccctaggcgatgaacaacatcgaaatcatatatctgaagcttcaaagcccatcgagccgtacgaccaaccaagttcttccacttcaataatgaagtaacagcagcatggtcaccttcaagtaacgtccgagaaccatgtagatatgcatgaagtttctcgaaaccccagactgctgctaaacactccttctccattgtggagaagttcatctccgctggttgtaatgtacggcttatgtatgcaatgggatggcgctgaccaggcacactcgagctctcttgcatcaacacacctccaagaccaatgtcagaagcatccacgcacaaaattaaagatcgagtgtagtcaagatatgccaaaaccggaggagtcgtcaatagctctttgagattcacgaacacccgctcacaatccaaagaccagatgaaagatgacgttgatgacttcagcaacgctcgcaatggtgtagtgcgatcggaaaaatgatccacaaaatgaccgagatactgcaccttacccaaaaagcgctgcacatcattcacacacttcggagtagggaactttagaacaaccacaagtttgtcaggatcaacttgcaaaccctcacgagaaatacggtacccaagataagttgtgtccttggacccaaacacgcactttgaccgcttcagctttaaaccaacgtcacgtagccgatccaacactttacaaacatcacgaacgtgctcctcccacgtcccctccgagtggatcaagacatcatcaatgaagtcagccgtcacctccggcatatcgcaaagaacttcgtccatcatccgctgaaaagttgctggagcattgttcaaaccaaacggcatcaccaagaactcgtacaaaccaaatggtgtacgaaaagcagttttaggaatatcttcttcggccatcggtacttgccaatacccagaagcaagatctagcttggtgaaccaacgacttcgccccagatgatccaagagatcagcagtgtgaggaagagggtacacgtccgggatcgtcacttcatttaacggacgatagtcgatgcagaaacgaatactcctatcaggcttcgtcacaagatgaggttcacatgcccaaggactccgcgacttccgaataacacccttctccaacatttccttgatgtttgcacataaaatcttgatcttcttgggtgaccgacgacgaacaggaaccttgattggacgagcatccccagttgggatgggatgacgtgtggcaatcttggccccagacgataggtcaaattcaaagagatcagaatactcctttatgagctggtcaacagctgcaacacaaagatcatcggagggatcaaaaaagggaagagcagaacaaaatggaaacacaagaggaaatagtgggggaacaaaagtaatggaagcagaggtagaagtagagggacgaagaggtacagaagtgagaggaatggatgaaacataaggaagtatgagacaagggggagaagcctcaaagtcacacttggcatgattgtgctgcaaccaatccataccaagaatgaggtcaaaagcttgactcggcaccacccgcaacgactgcaactcaagctcgagatcgcccacacgcacaaccaggtccgcctcatcttgtgcacatgcatgtgtatggccgttgccataaagaatgaaaactggatctgccacacgacgcaagtgtagacgacaacgtgtggcaacaagtcgagcaatagaagataaactcgaacttgtatcaaccaacacggagagaagaataggagacctcttgttataaaaacgagcttggaaagtaaacactggatgaaccggtgctgagcgaaccccttgatgatactctcgaaagaaagatggaggggtcactaacttattcgcgcaaggtccctccattacttgtgcgactcttcgtttcccgaatgcacctcggtatccaaaccttccaccgcagcagcaccaacgggacattgctgacgccaaggtctccacccaggaaatggaggtcgccaatccggaaagcaccgacaacgccgataagtataaccaacttcatcacacgcccagcagcgaacatcacggccacgaccacgtcctcgcccttgtccttggactcgagtagcagcagcatcaacctccatgggaacaggaccatcactcataggaagtggagctgaaggatgtgtagcaagaagtggaagaggcgacgtctcataacgttgtgccaagcgaagagcatcgtcaagggtggtaggagcaagtgcatgcgcaaggccaacaagatcttgacgaagtgctggccacaacattcctagcttgatccgctccgacatattaggctctgcacgaagcaaaagacttcgaaaacgaatgccaaattgcatcaccgactcagatggcccttggcgaagacgatgcaattgttggaaggcatcgtcacaatcgtcggcatgtccgaaggcacgtttaaagacgtccggaagaacactccaatccccacgagtggccgcactcaatccattgtaccactgcaacgccatcccttggagacacgtgggaaactcacgcaaacgtcgagcatcatcccaagaatgatatatggcaatcaccgtgaagtgatcgaaccaatggtacacatcatccccaggattcccacgaaagaactccggccgaacgcaaggattggcaccaagagcaagaggaattggaccacgtgccgtgaatgccgccatcaattgagtttggttgtttaattgcaagtgcatagcatcaagcaattgaaccaactgctgctctagagtcaaaggaggagattgcagatcggccatgaagatgaacgaaaaagaaagagcaaaagaagagaaatgacaaaaagctggaaagaaatggtagatctagacaatgcaaaaagctagatctaaaccaaaatcctgaaagaaaagaacaaaagaaaggaaatggaaaaagctacatctagacaatgcaaaagctagatctaaaccgaaatcccaaatccaagcactccctagggacaatcaaacgtgcccctcacctccaccaatgtgagtgcatggaatatggaacgagaatacagaaatgtgcatatcaattagcccaaaagccctagcttatatacaggagcgagtggtccggattgaaaccaatccgatagctaccaaaatcccactacgctaatatttatacggcatcgtagccgtacacttggccctcacaaattaaatttaaattagtgactaaaaaaatagatattgtagctgtacacttggccctcacaatatgtgtttagagtttctcataaattctcttatagtattttgaagtttttccatgattaaaacacttttttcattttaagtcaattataattctaataaatccattataatattgctttgtgacatttagtttttgaaaaaggacttattcatttttttattcttatcttacctcaatgttacaattataaaaattagaaatagagatacacacatatattttttatttccacttatcttagctcaatgttacaataaaaaattagaaatagagatacacacatatatttatttcttccagaaatttaatttttttctaagctattatcaaaattagggaaaaatttgacaacaaataaattctcttgtacttggggagtatttttgaaaaatcccctaatatcttaatttgaatatattaaattctttatccacttttgatattgtttttatctttactacttatactattttcttaacaagtggggttactgctcaatctaaattgtggaagagagacataaataaaaaataaagtttcaaaaaataaaaaagctttaacaagaaagcaaaaagaagaagcctcaactaccagttgaaagggctaaactaatagttaagagagtgagataaactattaaagaacctattgaacttggttgtgagaatgggataaattacaataaaatttatcaagaaagtaggttaaatttttgagaatttggtagtgaactaaatccttcatgaaagaatggtataaaatcttggtgcattagatgagggtaacaaaaaaaaactttcacaatagctatattcaataaaaaatttaaaacatcaagtagatttagagagggaggaataaataataaattttttttcattttaaaaagtttttccctattttttggcactagtgactacttagtaaatattgtttacttatatagcaatttttattacataacaattggttaaaaaaacattaaatttgaaggtgtaggatcaagcaacttgagacatcaagatgcatgaaaccaaaataatgacactgaacacttctatcctcctatcacaaatcttcaatacatggcctatttgttttcaggaacttagccttagatggaggaaaaaacacatacatccccaatgcagttccactgtatagaaagatatacttcagcaagccaattgtagatttcctagctcaagcactaagccttttattgttaccaccttttctcaagttaggtgctaattttctaatggagtgaactttgcatttcctagggtaggcatattagatgaaacaaatgcccttcaagcatgtatccatcttctatagttggtcttgattctttttaacatccgaaatgataacaaaaaggagaagggtttgcaatagctttttgaggaattctgtggctttgtttagcatgatcaaagttactcaacaatatcagcacaaagtgggaacaccaatttaattttacagaaatcattacttctgtagaatcatacaaaattgttttagaattttgttgtgaaagtcataatgattgttatgactcgaatgttgctccatctcttattatagtaattaagttgagaaatccttaaaaatatcatacacaaatatgataatacatcattccattcatattaacatgtttatatgaatctaagtttcaaagaggcagatagtggtagactttttgatgtagttgagttttataagaatgctattgaaacaaaaccacaaaaatatatatgctaacagtcctaaggattatttaatgactattttaccatggaaaggaaaagtgagaccccgtagagttgatgtcttagaatattaaaatgtgctaaagtacttttgatatgaatttacaacattaccaaggcttaagaatcaatttcttttttcaaataattattctagatcccacttttaactaaattctattaagagaattaattttttaaaaaatgctaagttatctttaaaacattttaacatccaagtaatatcaaaaattttactaacctttggctttccacatcaatgtaaagtggcacattggtttgtgatggtcattggacaatgttgacaatgataggcattgttacactcgtttttttaaggggctgtttatgcatgatgcacagatgaacaattatcacatctatctcccaaaccagaccctagattcacagaagaagagatcttaaggtgatcatatcacaagagtttgtgtttctctatatggaatagctaggtatagaatttatttatactaataaagataaaaatgtttttagattgtgagtgcaatggaatatggaaagagaatacaaaaaatgtgtatatcaattagcccaaaaacctagcttatatataatagtgagtggtcaagattgaagttaatctaacaattactaaaattttactacattaatatacggtattatagctatacacttggacctcatatcactccctcttcgcagaatgatggaagaccatcaaagttctcttatggatgggttgggatttggaggaacatcaagaggaggcattggtaaaattgtagatggtgccaattattcctgatccctttatacaaaacgttttaactactacatatgcataatttttggaggatcgacttgttaaatgtcatgttgaactttataaactttcaattcaacttgttgtaacactttatatagacctttctattgagcaaggagccttttagataaaccgcataccataatattgggaaaacagattaacatcaagtcattcactttgtattctgtaggtgaatgatgatgggagttgtattattgttgttatctcacttgtacacggcccaggtgtttggcagactttgctcaaacaagtggaagaatgctcatcaaatactaatcccacaacatagcatcagcaacccataacaatcgcaaaggtaaacccaactttgttagtagcattagatcataacaatataaaagtttatatagtgaagcaccaatagaactttatacctttataacatatgcatactaaagaaacgataaataaccatctcaatgtgaatgctgaaagttcatatacttcacgatcatctttttgaaagtttaaatccttccaccaaaccatttgattgtggatggtaaacacttgtgaaagtgtggtgtatccccaactaagacgtcaaatcacgtcttgattttcgtggtcaaatggaagaaatactaactggaggtggccacttttagctcttacgcgctcaaagccttgaagttacttttgtccatggcctgacagcttgtctatatgataatcactgaactgtagcagagagacacttacgtcagataaaagctcaagaactctatcctgactttccttgacttgggcttcagaaaagctttccagcttcttgacattgccaagaggattgaagagctcatagacatcctgcaatgttctttcaatgaaagagaagaaaacttgaaacagtagaccagatgctgtagcttacagtgagattttcttgtctagagcgatactgcaaggcaattatttgctccagcttgtcacaaagcagcagaaaatcatcccgatgcgctgaaaaggcaaggggtcttataaaccaaaatgctacgcaatctagtaccctgaccgataagaagaatagagcttggagatgagctccttcttgggaatctcaatcacaatctccagcttgaggcggatgctgtggtcctccactcgcagttcgatctccgacctgtccctgtgacaagaagcacaatcaggggtggacaagaaagatgaaagaatcaaacatacgcagtgtacttacattgctttggcaagaatagagggagggcgcctccgcccagctgcattttgttcgcggcaacaccatcgctttgcttgctgcctactcgtgaatctcctccttgcggatcaaggaagaaaataaaaaatattagggctctacatttgagttcgtgacgtggattagggcatgtgaggtgggcccgttaagggtaactagctgtttctcgaatatgcttactttaataccctttctattattaggcgcccttaccctaaccctaacccttctaacccttaagcatgacgtcacggtcaatgtccgctgcgcaaaattcagagttggttggcttcgtaagttggacatattttctggacataatgcgagtgctcaaagagcttcttgtcgtcaagctccacataagccaaaattttctccttgcaaaacaggtttcgcacgtgcaacgtagtcttcaaataaattacagccaggggactctgttcctcgtctccattgatcgcaggaactcagtccgaatgggcaaggcgatttgcgtgactggagctggtggtttcattgcttcgtggattgttcgtgatcttcttaacaagggcttttcagttcatggcactgtccgcgatccaggttctggtttgttgtctttgttccagatctagtgatggtggctttcagatgacagcaccaagtgtggacatctaaagcaactggatggaagcgagagactaaaactacataaggctgatgtgctcgactatgactcaatcgctgacgcgattcaggactgtgaagttgtgttccatactgcttgccctgtaaccgcatcgactgagaatccagaggtagtctcctatttcatttcttttctctggataaggctgactgtgtttttgagtcccaggatgttttggtgccagcaatcaccggcactcgcaacgtgttgaaggcctgcgcacaggagagggtcaaacgggtcattgtcacgtcgtccgcggctgcggtgatgttcgatccaaatcggcctgcgaaaaaaattgtcgacgagagctgctggtctgattctgactactgtagaaagctcaaggtaaacttatcctcaccctcgacgaagttactgtgttgtactcactgaaactcttgtttcaagcaatggtatcttttagccaagacggagtctgagaagctagcgtggagtctctccaaggagtacggccttgacctcatcacgatctgcccctcgtacgtgtttggcccgatgctccagccaacgctgaatctcagcagtgcggtcttgaaggctctcgtggatggtttgtgctttaaaaatgcttcagaagcctgatcgatgtgtcttgtttccccaggtcatgaaagcagctaccgtgattcctccattccggttgtggacgtgagggacgtctcgaaagctcacattctggccatggacaaggaggaggcctcgggccgctatctctgcgtggaaacggttgtgtccaacagcgagattatcaagattctcagggccaagttcccgcagcttccatatccaaaagagtaagcgtctctagttcgtttctgccgatatctataaagctagaaactctaggtgcgttgctgagacgagcgtttggaaccaatcgggaatccgtcccgacaatctgggaagagagaagctcttggggctaatcactgagtttgatataccattggaacggatgctgcttgacgctgtttccgacatgctaaacaagggactgttaagagccatctgatttaccggagattagaaacatcgggtctaccatctcccatataaggacttcaatttgtgtcctggaaa

SEQ ID NO: 14851 - DNA, 18611 bp, Selaginella moellendorffii
  Intron number 2 from transcript 79648 (locus 79648) derive d from phytozome v7.0 (chr-ID scaffold_3; pos 1785914 to 1 804524 reverse strand)
agttcatccccaattcatcggcgtccttggcgcgtgttggctccaaaacgatcgcgctagatccgcgagagctgctgagtttgttcttgaggcgtccctatatcctgctcgccaacatttgttctatcgcaatcttcagtaattagtgacaaagaatatcttatccttgttacccagaaagaatttatccgtaaaatgctggaagcttatatctatgcaagttatataatagtgatgaagaatcgacaagcaggatcaaagtgttttgtatagtttgctaacttttcatgtctacttaatgttagttatgttttatagtttgtctctcacacaaaccctaagaaattgaagatggcgcatgtgtggggcgtgaccgatccctttcgttttccgccgagcgagttcaactttggggtgctccaggctgtggagccgttcctgaacatccaccgccaccaggcggctgtttctcagctcgccttcaacaggttcaagggcgggaagatgaacccggatgcgctcgatgcctgccttcacctgatcagcacatccatggcggatttcgagaggtgagttctttcatccctgctcgcaatccccaggttaccttgacccgtgcagatcgacagagcttaacttccgacccaggcatttggaattgattcgtcaggttgaaaaattcaccacgccaactgatgcagagtacaattcctcgtccgttgcagatagtgatgaagatgaactggagcagaagggctttgtcattgtcctttccggggcgaacgatgccttggaggaaggtgaagccatcttgaacgaggacagtaacgcatcggggagcgacagctcaagctcggacgaaagtcaaaaaggttttcatctcgacacagaagcacctccttaggctccttacgatgtcgcagatactggccggaccgagagagcgttcgtgttcaatgaagggcctcacaagcgaacagagtgtgaggtggaacggcttcgcctgtcggcacagcgatgtgccttaatcagcgagttcaaccccagcgagacgtgggaagcaattgccaaggctgcagcttgtgctcgtcctgaagtcaggcagaacttgtcgaacagacactgcaagccaagtaagttcttctcttttcatgtcttcattcatctttttcttttcatgcagtgcccgccaatatttgaccttcagctttcagaattgcatatgtgaacttgtgcttggagagggccaacaagtatgacaaagtcttggcaaagatgatgggtgtggaaccgtgaggagcatcagggacgtccaacttgcctatgagttgatatttgtgaagccgtttgtagagaaaagaaaagagagtcctgtttgaagatcgtactttgcaagagcttgtttttcaaagaaccgaagtccagattgtgactgtttaccttcttaatgttttgtagggtatgtgtgaagcttctgcttgttctagtgcagcttcctcttggtacaaatatgctttggcttctttctccttaagtagacgagctccctgtacacagaaaacgaatttagttagaactattagtaattaagagcattggattttcaactttcaccaacaccgtttcaagggcctggctcttgacgggcgcctataaaccctaacccggaaaaatacaatcatataagaagtttcaaactttcctatgcgctaagctgaaattaattatcacaacaatcatcctataaaaattttagtaagacaactcgaacaactaaaattcgatctacaggcatatgcttaagatctaacagctgagaactaattataattgccttaatacaataaattgctctatattattattcttatctaatattgttttttaaaattcgataacattctttgatactatcacattatgctataaaagacatatgttaaaatagatttataagaaaactaaattttattttttatagtaattgcaatataagttgtttatttatgttttataatttttatattaagatatttaacatagaacattaaaaaaattagtgtgtttttattttgtttcatttgaggtgattggtatatatctttgataagtccattacaaattacgattataatgtggtgtatcaacttacttataaataaataaatctttaacgtatgctatgagtgtcaaatgtctttaattttgttaaacatttctttgatattaattatgggtcatattttatttttataaatttttttctaattataacttattcttttagttataaaatttaaaattcttagattttgtatgctctaagttttagctataacaacaactatatgatctaggaatgtttcatgttcttacaacttggctttgaatcgtgatttattaataatattattaaataatggtagatgttggacactaaatttttaaaaagtattttaaataaactattaaagaatttatatttaatattaattttttaaattcttgttagtgcttatatatttaaatgaataagctggtttcataatgtcaaatgctaggaactaagcatatgccaatctactggttaagattaacaagccttaaaagaatttgaaataagtattggcttttacatttaacatatgagtatatgagtctcagtttcactggatgttaatttaaaaattatagtttaatacaattaaattttctatattattaattttctgtctaagaaagttttgttaaatttgataacattctttgataccatcacactatgctataagagacaatattagagctccttgccaagaaatccatgcctatcaatcattgactctatgtcttttcttcagggacaaaacaattgatataagccatgactacccccttctctacatgatggaatactacttgattgaaaggagggcaattccagtccagacaatcatcaccactggggtttgtgcctgtggtttccaagcaaaaaggttggtgctgcttaccatgtgctaagtgttggtgctggtcaccaacgcttatgtagctctgagcccaacccagagtttacagcttccgtggtggctccaaaagcccgagccaacttccaggtttccaagatggccatgagatgagcatggtaggacttttctatctatgttggatggtctgacgtgagaacaaggcaccccattgtggcttggagcaaaggtagatcgaacattagtaagtcaataaaggctaacctcaagagcagggagccaagtttgagatgtatcacctgcggcctgtttagacttggatttccggagatagtggtgagcaaggcaaggctggtaagccactgtcagacaggcagcaaaaagacgagagcgattccatagacgagctcgtccagcaaatattcatgcatgacacgtaagtcaggtaagccccatcttatagcaaagctgtaaacgaaggggatctgtcctcatgaaagcatccattgctagttttcactggagcatgccatggatagttgtgctcaaggaaagtttttgagttgtcttggttcatagtgttttattggacaatgcagaagttctagcgtagtcatgtaaagaagtagaaaagaaaagaaaaaataggcaaacatgctagaaacctgtgagaaactttcccatgtcttcctgttcaagatcactagagcttcgatttaaggaaccctttccatgcagcgtctgttccttggaggctgccaagtagaatcttcgctagctcatcttcgtcatcctccttgaaagtagtgattgtcaagacccccaacaagatcaagactggaaaatgctaaagacaaagagaaaaagctagtgaaaacaaagaaaaggccttagactggtgttgattcagattgtggagaaatggaacaaggctaacctatatatactataggttgatgaagctccaccactcttggatcgaggacagcctaaatacagctgaggtcgaggaggcgccacatcatcatcaggaatgtggctcgagactcaggaatcgggaagtgtctcgagagtcaggaatagggaagtgtctcgagagtcaggaatagagaagtgtctcgagagtcaggaatgtggtctgcaggtcaggaatccggcgagagtcaggaatgtggcaagaattgggggattcctgacaacaccccctcctcaagaacgagtggaacgaggatgtgaacgagaacgaagaggaggatgagatgagcggcgagggatgggagatggagaaaaagaatgaggactgggacgagaaggatagcggcggtggaagtcctgaacaaggtcaggagaatgaatcaggttgtccgcaggttcccaagtgcgttcctcaggtccgtaacccttccagtccaccagatagtagagtttagatcgtgaaatcttggaatcaaggatgtcctgaacctcgtactcagacccatcctcgagctgcactggtggaggcggaggaatgacccgatttggaataggactgggaatataaggctcaaggagagaggagtgaaaaacggggtgaatttgatatgaggagggaagtgcaaggcgataagtgacaggattaatgatggcagtgatagggaaaggaccaaggcgtttgaaatcgagttttggacagggcctggtggtggagatatttcgcctgaggagccagactttatccccgatattgtaagggggacaatcctgacgatggacattggcaaatgttttatgagattcctgagcacgatggaggtggaaggagatggagttgtggatttcctgaaggttggagagaaatgattcagagcggggatttgaacgagaggattcagatggagaaggaagtgagagattgaatcggggatttcggccagagttcgcaaagaagggggaaactcgaagagaggagtgaacagagttgttataggagaactcagcaaggggaaggatatcaaaccagttatcctgatgatagttgatgaagcacctcaagaattgttccaatgtctgaatcgttcgctcggactgcccatcagtttgaggatgatatgccgaagagaggttggccttcactccaagcaactgcaaaaaccgttgccagaaatgagagatgaactgaggcccccgatccgaaaccacatctgtaggaatcccatgaagtcggaaaatttccctgaataccagttttgccatgtcctcgcccgaaaactccttggtacatggcaagaagtgcgccatctttgtgaagcgatccaccacgactaaaatgctgttgaagcctccagaactcggaagatcactcaagaaatccatggagatggattcccaaggacctgaagggaccggaagggaacgaagcaaacctgaaggaaggtggcgaggtaccttattccgggcacaagtgtcacaggaggtaacaaaagctttgatgtagtcgtccatgtgaggccaccaaaagtcccgtgcaactagctcataggttttcgcaatgccgaagtgaccagcagtcgggctatcgtggcacgccatcaggatcaaccttcgagcatcaccttcaggaacgtaaagctgctccccacggtacaataagccatctaagaactcgaactcgtcaaatcgccggcagtcgggagtcactgggtgtccagcctgaagatggggaaaaatgtcgctagcaagatcatcggattgaagatcgtttctgattgcatccatcaaggaggagtcctgaggggccagggaaattgccataacttgaagccgatcaggaccgaggataacttgatcctgttgatcgaaggcaggattaccaggcctgagactgagataggagcgccttgaaagagcatcaggaaggccttgaaactttccaggtctgtacttgataacaaagtcaaaccgactcaggaattgtgcccaccttgcttgacgacggcttaaaactcgggaagtggcaaagtactcgagatttttgtgatccgtcaagactgttgtttgatggcttgccccctccaagaaacggcgccactctccaaaggaatccacgatggcaagaagctccttgtcgtggatttcgtaattgatctccgcaggctggaatttccgagaatggaaagcgaccggatgaagttcatgatccgctccgagttgagatagcacagcaccaatggcaaagtcggaggcgtcagcctcgatgaagaaaggttgtgaggaatcagcatggatcaagacaggagcagaactgaatgccgccttgagtgtgtcgaaagcctgctgggcagcagcagaccaagagaagggaacatccttgcgagtgagatgtgtgagaggaaggacaatgtcagagtagtgatcaatgaatttgtggtagaagttggcgaagccaaggaaaacctgaacgtctgacattgattgtggaggctcccattcgagaatagtcttgacttttgcaggatccatcgtgataccctcaggagtgacaatgtacccaaggaactccacagactgctgatcaaaggaacatttctcaagcttcgcgtataggccgtgttctcgcagcttcgctagcaccttgcgaacatgttcgtcatgctcctcctgagtttttgagtagatgaggatgtcatcgaggtagacgatcaccatctgatcaagaaactcccgaaaaacgtcgttcgccatgtgttggaaaaccgctggagcatttgtcaagccaaatggcatgacagtgtactcgaagtggccatagcgggttcggaacgcagtcttccattcatcaccaggccggatccggatcaggttgtatgctccacggaggtcgatcttggtgaagaagcgggcaccgccgaggcgttccaacaggtccgagatcaggggcagtggataacggttccgaacagtcaccttgttcaaacctcggtagtcgatgactagccgcaagctcccatccttcttcttgacaaagaagacaggcgctccagccggggactgcgaatgctgaatgtagcccgaggcaaggttctcatccacgtactctttgagggccttaagctcggacggggataacccgtagataggcccccacggaggtgacgctccttcctgtaaatcaatgggacaatcataaggccgatgaacaggcagtacactagcttttttcttgtcaaacacatccccaaaatcatgatacttctcaggaagactgacaggagaaacatgcaaagcaaaaagaaaaagaggttcttcatgaaggagttctttcatagtgattgtggagataggaggaggagtacgactaaatggaatgatgagacgaggatactgtccagtgtaatatggaagagagaaaaaagaagaggatgaaaactgcgtagagtcaggaacagaaccccgacttgagtttagggaacttttcctgattcggactcgatgaacaccaggggaagccgtgggagatggtgatgtgggagagatgagctgtaagtccttccaacaaatctgaggctgatgtagttggaaccaaggaagaccgagcaccacagaggaagacttgctgttgatgatgttgaaggcgatatcggtgacggtggacccgatgtgtactcgaacgggcaacgtttccctaagtccagaagatggagacacaaaatgcccgccgatgccttcaaccctcagatcccgtatggtaggagaaagaggaacgtgatgtcgggcagcaaagtccgtgtccatgaagcaggaagttgcacccgagtccagtagcgccaaagccttgagtcctgattgtccggtgaaagaaaggagacatggaacgcggaagttgcgggaattggtggtggctttgatgaaaggtggtgaggagcttgataaggaagaaaagtgatttttatttggggagtccaaacagacagctcctactctgtttggacagggtcgtttcccgactgcaacagtggtggactttgaggcagagtgaactcgagcaatcggggaggcttcctgggacacatagctgctttgtgattaggatcagcacagtagaggcaaagattatgagatattcgacgttgcctctcagcaggactcaacttccctctaatgagtcggggagtaccagaaatatccatcgggaccggagcagtaggttcaggactatgccccgaagactcaagctgggattcctgagtctgggacggaaaaacagcggcgcggcgactttcctgacgacgttcaaagagacgattgtcacatcgaacagctttgttgatggcgtccgacaggtccttgggatcctccatggtgagcaacaaatccttgacaccgttgttgaggccgaaacgaaattggtcaatcagggcccgctcatcccactgagtgtccaaggcaaggagttggaactctgcagcgtagattgaggcaggacgagacccctaagagagacgtctcatctttgtggtagcagcccgaacccgatccgtctcgccaaaacatgcttcgagcttctctttgaacaattgaagatccatcagctccggaaccacgacccctttcatgctcttctccagaagaggagaaaaccatgacaaagctgcaccctcgagcaacgtcccaatcgcgccgatttgagactcgggagtggggtaccgccgatgttgaagtgcaaagatcagctccatttgattcaaaaatccacgaagctccgaacgcttgcctgaaaatttcgccgggaaactcaccttcggttcaggaactttgctggatccttgagccgaaagtgaagcaagctcctgctgcatgcgaagaagggtcgccttcagctcggtattctcagactggatttttgcaaggacttcggcaaagaaatcaggatggcttggagactccattggcaagaagaaagaaaagaaaggggggaaaagacaaaggcaatcaaataatcaaaacaagctaaaagaaaagcaaaaaacacaatctgaatcaaactgtcaagacccccaacaagatcaagactggaaaatgctaaagacaaagagaaaaagctagtgaaaacaaagaagaggccttagactggtgttgattcagattgtggagaaatggaacaaggctaacctatatatactataggttgatgaagctccaccactcttggatcgaggacagcctaaatacagctgaggtcgaggaggcgccacatcatcatcaggaatgtggctcgagactcaggaatcgggaagtgtctcgagagtcaggaatagggaagtgtctcgagagtcaggaatagagaagtgtctcgagagtcaggaatgtggtctgcaggtcaggaatccggcgagagtcaggaatgtggcaagaattgggggattcctgacagtgatgaacctgtcccgggatctgtgtttagctactgtagtgcatatgatcatgggatgggatttgaaaatattgtcaccgtggaaggggataaatggggataaaatagccattaagggttttctcatcaagcaattgccccttttctagttagcttaaggggagagagataaggtgcactacagttagtatcagagcaaatggcacgggttcaattcccattgattagtggctacttaaaaatataatatacccttgagcaaggtatattcctacccctaaatttgaaattgtacatattgggcattcatgcgtatgtccttcctcttgtgtggtgtatccatagacgaaggtatccactgtgggactgtggtacggatggatgattaattgcctcacatggaatagatggtctatacaatagaagcaatatcagcaatcagttcggactggttcttatgccgtgcaaggttgttgaaacaaggctttggtgtatccaccatgggactgcggtataggtggatgattaattacctcacatggaatagctggtctacacaatggaagcaatattagtaatcagttcggactggttcttatgctatgtagggttgttgaagtagggccttggtagcgaagtagcaaaagttgctagtcgcactaatgcgaagcttcacttctcagttcaggatgggcttatattctataagcaagaaagattgtatcttccctctaaggatctgtagcagttgtttctgcgggaacatcatgatgttccagtagcgggacatggtgggaagcgaaagactttggcttcattgaaaaagggatttttctggtctggtatggaaggtgatgaagtggattatgtccgtttctgccctatatgccagcaatgtaagtgcaaaactgagaagcaagttggaaagttgcagtgcattccagcaccggcatggccatttcagggtgtgacacttgatttcgtcacttgcttgccgaagtctaagggttatgatactttgatggtggttgtggatttgttatcaaagattgcacacttcattccaactgtgggaacaataaatgcgaaacaagcaacaaatctctttttccatgaagtagtgcgggttcatggtcttcctgaagagatgatctcggatagagattcaaggtttacggggaagttttagggcacattgttccagctatttggtaccatattgaaatttagtacggcttatcatcctcaaagtgatgggtagaccgaatgcgtgaatgctcaagttgagaattatttgcggtactatgttgcggcgaaccaacgcgattgggttgagcatttggatacagcagaaatttgttataacaacacatttcacagcactattggttgttctccatgggagatgttgcaaggaaatgctcacggagtgcctcaacagattgttgtactgaaatcaatgactgaagtgttggtctcggctattgagacttatgcagagcagctacgccaaggttggtctagagctactaaggcgatgggcaaagcttaggataggtatcaacgtgataaggatcagcatcatcgggatgtatcctatcaagtgggagatcaggtgtggttatcttcccggaacttgaacattaagggttctttgtctcggaagctcttatcgagatatgttggaccctattgggtgttaaaacacattgatgatgtatcctataagttggatcttccaggtgagttatctcagctacatgatgtgtttcatatcagtttactagcaccatattatgcttctgtggaacgctctacggacatgcgtcctccgccagtgatcatggatggtgaatctgagtatgaagctgagtctatcttggcttctcggtttcggagacgagcttgtgcgaaggaatatctagttaagtggatgaatcaacttgggaaccttttagtaatcttacccatgctcataagcttgtcatggagcataagaatagtaataaagattagtttttgtaaaaatcttgtaataaatcttgcaaatcaataaagaatatatttctataaatcaaagtgtcgtttctctcgttcgatagtacttgggtcagttttggtaggctgactttggcacttcggtgcatgggtccaatccataactatggggataactattatagactgatcacaagtccccacctctctctcgatgactcacttttgcaaaggggcatagtcgtgtaaacaacttaatctgccaatttataatagttgtctaaatcttcccgatggggttgatttcttgctcaggggtagttgagcctctagccttttccctatgcccctgcgggcagggatgtatcattcctttgtaagccaagtggtattcggagcagcaaggggggctaactctgttagtcatttccttgtcagtgatggccggagggtgtctgagtcataacgtctttggatgtagaggagaggtcattccataactcatttaagtcggtgtgtttcccacataatgtgcttttcgttaactttcggagttgtttccttgacggttggctagactcgggtatgcatcgatgaggacgtcgatcttccccaagggggggagagtgtcgcaaatgtgactttgggtatcgaaagatacttgtcggctagttgttacgggcactctttccttactgccatgacggcaagaggtcggtattgctggttccctttaatagcccctcgtgtccaagtgttagtttactgggcttagcatctgtacttagtcaaatgaacataaggtaggaactcctatgtgtttctagctgagcattctcggcctggctcttagttctcttttgctctgtattgcactggcttggcaagaaccctcgcgtattgagactagtccctcaatgtcactggatgatagcttaccgtgtttgccaaacaccctcgctatcacgccttttgtgttggtctcatttcggtcccaaatgctatttatggaaagtgtttagattagctcatttggcatatctacagaatgtagagattggcccgaacacaatggtgtccgttccgtgtccaaattcgcaatctaccgccattccatattagtaagtttcaaaagagactaacttctagtactaagggaagattggggtgaaagcccaaagcatgtgttcctcgggggggggggggtggcgcggggggctgtgggattgtaccggacccttgtttcatagtgtaacgggcttggagttcatctccaaattcaggtgcgctacagctgcagtgaagaagaccgcttggaaagctgaaatgcgatgcaacaggtgcagcgcaagcaggcatccaacacgcccattaccatcttcaaacggatggatctttttgaagttgatgatgagccttgcaactatggaggcccatttggcgatgctcagcttgctcttgctgtgctctttgagacggtctaggaactttcgcatcttgacctggatgtctcggggatgtgagtaactctttccagcggaggacatggcaccaaaactgtggaatgccaggacgggtgtcatctgtagagcttcatgcagttgtaaaagctgcaaggtcgtgatgggtgagctctctggccaggacctaatgacggcaagacctctcaagagccctgcggatcaagcaggatcatccaagccataggacgtagcaactttgatagcttgggtgtcccaaaaggcctcaaacttggagtggattagataagtatgtggagagagctgcgacataagacataccagaaggctgcgtggttggatggtgtaagcagtggttctggctccttctccttgccagcttttcccgtcagtttcctcactgcaatataaacaaacactatacaaggttgagagatcgaaatgcatactagcacttcagatgagattcagagccgcacaccgcccatccatgataccagctgagagaaattcccaagtcctgtgaccctaggaaggtgcatttcatggaatcgttggaaatatggcaatatcaatctccatacctacacaagccgcaagttgctcttggatcctagctctgcagggattctgtggggggttccaaatgtgtagtagagatagtggttggaatgcatgtttgaccatctgagacattagtttggctcccactgggttgtgtcactctttgttctgcgtcgggcttgggtctaagcccaagctccacgttgctctagtcggtggggtaccctcctccttgcattatgccaccggtatgccaaaattgtgccaagctctatctaacaccattttgcgtgcagatgctagatatggggagctagtgcttgtgggattgtaccgcaccctcgtttcgtagtgcaacgggcttggagtttggctccaaatttaggtgcgctacagctgcagtgaagaaggcggttgggaaagctgaaatgcgacgcaacaggtgtagcgcaagcaagcgtccaatacgcccattaccatcttcaaacagatggatcttcttgaagttgatgatgatccttgcgaccatggaggcccatttggcgatgctcagcttgctcttgctgtgctccgcgatgcttgcgttgagacggtccaggaacttccgcatcttgacctggatgtctcggggatgtgagtaactctttccagcggaggacatggcaccataactgtggaatgccaagacaggtgtcaactatagagctttgtgcaattgtaacagctgcaaggtcgtgatgggtgagctctccgggcaggacctgatgacggcaagacctctcaagagccctgcggatcaagcaggatcatccaagccatgggacgtagcaactttgatagcttgggtgtcccaaaaggcctcaaacctagagtggattagataagtacgtggagagagctgcgacataagacataccagaaggctgcatggttggacggtgtaagcagtggttctagctccttctccttgccagcttttcccgtcagtttcctcactgcaatataaacaaacactatacaaggttgagagatcgaaatgcataccagcacttcggatgagattcagagccgcacaccgcccatccatgataccagctgagagaaattcccaagtcctgtgaccctaggaaggtgcatttcatggaatcgttggaaatatggcaatatcaatctccatacctacacaagccgcgagttgctcttggatcctagctttgcagcaagaaaaggaagctgagcgctacacacccggggcgagaggagaaatcaatcgctgatgctgagtcggcctgatccagctaacagggagcgatctagagcaagaaactatgaaatttcgttgtgattgaccgaagcgcctaccctgcgctggcgctagattaatcgttcaccccgctagcgccatcaccatcgtgctcacgccgtcgcctcgccaagcgctggagaatgagcttgcgccaacagccaattatcgcgtgccgcatgtcaaagcccgggaaattcaaatgtaccccttttcaaaccttggctgtataaaaaggggcccttctgggttgagggtagggcatatagatggggcgatacgcggagaggcccttctggaggtgcgatggcgacggcgccccggcgacgagcagcatggtggacgccatttgtgggtacgtgaagaggttccaggccctagacgtgtacgggcagcgctatggccgacttcctcttccaggtgaacaagctggagctggaaggctttgatacccgggaccaaacactccacaccctggagcatctccacgaagtggtggctccagacaagagattggaacaagtctgctgcctgtcccgagcattcaacacatggtggctccaggaggagaaggccgaggaggctcccaatgtcaacaactacaagctcaggcagtcacacgagcttcttatggagccgagcaggccagagatcgcaggcttgtttcattccggcagtgaggttgcaatgacaatcacgagcagcagaaggcagcacttctacgcggatgcctgggcaatccggcccaagttgtccaagttggtgagcaagactaatgcggatgtggagcggctctttgaggaggaggcaacgacaaggagctgcaagacggtggagcagctcctggtgctggcctcggacttcttctacaagtttgagtgcatccatgcgtttgtggatgggaatgggcgatgcgggaggatgatgctggcctgctacttgcttcgcagcgtggctgtgttccccaatgtcttgtttgctgctggcgctggccgccagcacgagtttgtagaccgggatgtctacctcaagtgcttcgagagtgctcgcaaggatgaccacaagcccagggacctgactgctctcatcatagagggggtctacttcggttggcagaggttctttgtggccctcgagtcgtggcagggcctcaagttgtagcgacctcatacttacctctcgccctcgagaggttgctcgagctcgctttccagctctatttattcctggaaagaccacctgccttcctcggccacgtgtcaatgaaggaagcgagcgactcaaacatacctttgagaacaaaaactctatgaggtaccatggcaaaagctcactacgtgaccaggaacaaagggaggaaagctttacctgatcgaaggaggtgctcgtctttgcgtgatcatccctggagctttgcatggcccagattccaacaatgatctctccacgactttgagctaaacgaaacgtctcgaggacgcctaccgcacagatcctagaagcttgacgatctctgaaaacaacgacatatcgtcgtgcaatacaggcagatcttactcgcgtgattccaccagcgcaaccctggtggcatcaaagagcttcacattctcacctccggcgatcctcaaccaccccgaacaagaacaagagagagaaattgaaccccagaaagagacacccgcaggaatcgaacgcgtaaccggacttggttcacaaagaatattcggctcgtgatccttgtaccaatacaatatataaaactatatactactcactaaatatttagaaatgttaattgcttgcagctcattgcaaatgctcaagagaaaaggccagagcctaaggggcatcttaggaggggatttttctaatatgatgatgccaagtatttctaatatatcctaacatgtatctcttagtatgatggtatcaaagaatgttatcaaatttaacaaaactttcttataataatatagaaactttaattgtattaaactagataaatacatctaacattattagtcttcattatctatatttattgataacatttaaaattcttaaacaaaatatacttattaatttctaaaattattatttgtatatatttttattttacagtggttagtagtttttcaattgcattattaagatttccctaaaaatagctataccatttatagttggagacaggtatcccaatcacattaaaatcaaagtaaagattaaatgtttaataacattatatttttatgtttcttattgatatattcatatgtgattgcttataaaaatcctatatataaatttatatatcatatttctcttttaatactttttttaaaagtgcttcactatataaactcctatatggttataatccaatgctgccaatggagttgggttcaccttcgcaattgccacagactgccaatgctaggttatgggatcaatatttgacaagtattttttcaattgtccaagtaaagtttgctaaacatttaggccatgtacaaatgggacaacaatgatactacaactcccatcatcgtttacctatagagtataaaatggataacttggtgttaatccattttccccatcttatagtatatagtttatctacattgctctgtggaaaagtccatattaggtgttgcggcaagttagaccgcaagtttataaagtttaacatgacattcagtaaattgatcctccaaaaattgtgcatgtgcaacaattaaaatgttttatataaagggatcataaacaattgacaccacttacagatctatcaatgtctcttcttaatattctttcaaatcccagctcatccacaaaagaaccctaatggccttctattatttcaagaggaggggatgatataaaatttaagtatacagctataatgctatatactaatattagtatagtaggattttagtaatcgtcagattggtttcaattcagtccattcgctcttgtatataaactagggtttttgggttaattgatatacacatttcttgtattctctttccatattccatacactcacaaaaaataaaatttgagaattaactagtagattgaggtgtaataaatttaataattaagcagcataaattaaattataacaaagtaactcaaaaataaactagaaaaacttctataattttttttaacaatcttttagaaaaactgtaccttaaacaatgtagcattttataattaaagttcccaatgaagatgaaggtagaatggcacaactttcctcagcaactcatggcagcctgcaaaaccttctttgggatggagtcggtaggttgcatatcactgaatccataccttggcaacgaccagcaaggcaagattgtcccaggagccttgttcctcagcagctgctatggcatcttacataaacccagaaggaatttcgcaacatgcaagaaagaaaatagtacctggaatagcaataaagtggacctcaaccacaaacatggtgttttatccgcacaaatctgttacttcaaaggtgcaaaaaaggaggaaatctaagttctagtagatcaagtattatagagggttgtatgcgctcgttgcgattcagggtctggaaagatcgctcgttttcttccttggcttgttcgaccacccacagcgttgattccgcagaaggccaaagggaggttgagaacaggtatgcggcgctcatacgcaaatgccgccacttacacgaagtccggagagttcacggccagctcgccgaagctggatttgacgggcacaggtacctcacaaacgtgctcatccagatgtatggcaacctcggcgggatccaggaggccaagcttgcctttgagcgg

SEQ ID NO: 14852 - DNA, 34347 bp, Selaginella moellendorffii
  Intron number 2 from transcript 134551 (locus 134551) deri ved from phytozome v7.0 (chr-ID scaffold_126; pos 252355 t o 286701 reverse strand)
ctctcgtcagcatgtatggcaagctcggtaggctcgagcaagcaaccgtgatcttcgaaacaatgggggagaaaagcgtcatctcgtggaacacaatggcggtggagctcgctaaggccgggcgctgcgaatcggcgctggaagctttccggggcatgtcactggaaggattggagcaaagcagcagcagcttggtggcggtgttgtttgcgtgctctcacgctggcctggtggaacaaggcagggaaatcttcctgtgtgtgctggaggacaagcctggcgacgatccaatgccgagagccgagcactatggctgcatggtggatctcttggggcgatcgggaaggctggacaaggccgaggagctcatcgaaaacatgccatttgtaccggattgtgtagtatggaacatgctgctcgcgtcgtccaagagctatggagatgtcgagaggggcaagcgcgcagccaacgaagttctcgccatcgcaaaatccatgcccgggaagaagggactaagctccactaacgactcgccttatgtggcactggccagcgtcctggagggaaagcattgagcctatgcttccactgagatttgaactcaggacctcccgcttactaaacgggtgctctgaccagctgagctatgaaagcttaacatttataaccatgataaatgtctttaatataaagtggccagagcaagcgatattgacatattgacatacgatatcagtcaagactcccgttattaattcaaaatatttcacatataaaacacaattataataagaaacttagaacttcaagatacaagttctataagtctcttccaaaagcttttcacaattctcaccacaggatcagcacttgggtcacaatcatcttagatcatacacagtatagtcctgctctcaccctgagacgaagtcacacctttgggcaaacttcgaccgtttggaccgctttacgcgtggtggtggcaagttccgcttccgctcgtgagcttcagcctgcagggcactggggccgaacttcatcctcctcaagaattcgagagcagattcatcaccaaacaggtctgcagcattctctgcatccaagacgacgaagcctgattttttccctcccgcatgcatctcccagaaatagcgacattgatctcccttcaactgcggcggcattaccaagagctttaactgaatgctcgagagcaacttgtatgcttctgtatcctcaggaaaaccggtattggtcgagctcagtgcattcttaggaaacttgtgctgctccaagacgtgcatcacgtacacctctgtgtctccattcccttcattgaatttgtagcgaatgcctcgcacagcatcagcaccggcagtgttgtctcctgagatccatgtcgtgcagagtggatcatccctttccaagtccacaagaaagacttctggatcgtagccgtcggcagaaacaaatgcatcgatcaagcctttcacaacttcacctttcctagcggccaactcttgaaacccttgagggcagccgcttgcctgcagcagtggtctgagaagtggcatgtctgccattttaccaccgaacttctcccacatgctctcaaacgatagagctaagaagttctgcaagcacaacccctggcctgacggataaggcacagcagccgttagtcgcagccactttgatggcaggtaactactcgggaggaatccctttgcctggtgttgatcttgaaaataatttctagctgctgcaagaaccaagtactcgtccacatgaacaatgcaccccgcagctgtccgctccaaccatcccagaccagcctcaaccagtgccacacatatgtcctcgttgtccctgaaaacgtaaccccttccagcaccgaaatactgcactacagccgcctcaagttcctgaatgagattcactccatggacaatggcctgtttctctgccaacttcgacaccgccccgtaggaagttttcttcgtctctggctgactccgctttgttgtcaatcccactgtgacataagctgctgcctcccgcaggctcaagtcctttaggatcatgatttccaaaacacacgccagtggtcgaaaccttcctttaaagactttgtacagggtccgcaagtccgcttcatcgtcttctgttagtgctatagcctgttcagcgtagttaaccatctccttagcattctcccagataccgaagttcacaaagtcggtatccgctataagcttaccaataccagtgcagagaagatcctgcttgaagtacaatgtgtaccctgtgcctgagactatgactacgtgcttcagagctgtatccactctgcagtgattttccaggcagttcgcaaaaggcacgtacccacccctcgaagtcgaccaaaagtagccatcctcaaacaatttcatcgcttcttgggcttcgtcaagagcaatcgttggtatgggcaccggagagttgagttggtgtaacagtggctccagctgagaccctatctggttccgcgataaaccacataacttcgtcaccgcacccctgaagaactcgcaaaaaggatcgcgcagtagagcaacgccgtcttgctgtgctaaacccctgcatgcggcttgcaagagcagccactgacgcgacgtgatattcttgctcttgcagtagagataaatcttcattctgcaggccagtaacagcgtcacgaacactctggcgacggtctggttgagggccaactccataaggctctcaccttcaggattgcgatgggcacgaatcagaaagctctccaacatcctgattgagaattcgagatcctgagaccccccgttgagggcagtgacgacgaaataaaatccatctctttcctggaaaaacggagggtcaggtcattgtgatatatatttgcatgcacttaacacagaaaagatcatacaatgaccttgttttcccgcatcctgagacaccagaaacgatcatgcatcgacggcctagactttcggcgttctcgagctgctctttcagctgggcacagcaggaatgctccgactgacctatccggaacagcagcatactcggtaccttcatgtagacaggcacgccataatcatcatctacagggagtgaaactttgccttccaagtacgcatctagaaaatcctggacttcgtttggcagcagaagcgcttcgtcccaatccaactcctccattccactaacccaagggcgtgcgcaccctaaatccccaagccatgatgattctcggaatgtactgtagtttgtgttgatggataatctgatattgctaattaaattgagtttacctttgtgattgttacaagctattgatgttaagtcctaagatcaataaatgaaaactcttctattggtttaagtagagtttattaaacacttgggccatgtacaaatgggactataattttaaccatcatccaattacaaagtataaaatagatgattgagtgttaattcattttcccaatcttataatatctctttgctcaaaagaatggaagtgttataggaaatttctataggaatattaaaaggcactaaagaatttgtaggtagtgctagttgttcctaatccctttgtatcccggcccattaactagaaatctttaactaccttttgttcttttgagaagaagtccaaatttatggctataatgctctatattattattagtatagtgagattttagtagcccttggattaattttatcaaaaccactcactcttctatataagttagggttttttggctaataaaatatgtatttttctatattccactttcatattccatgcactcactgtgaataaattgtgcatatttaaattttgagttcaaaaattttaggagtttttgttaaatataaggacaaaattctcatttatatttaagttaaaccactttcaaataaattaaaggatttaatatataaaaattaaattttaaatacactttttatgattttattattgattatttttatatctcaaataacattttaaaatttatacacaataattaatataatttaagactcaaaatgagtgataatttaaatactgtttatatataatttattctaaatttattttatcaggttgagatagagcaatgaatatacctagaaagtactttgatattctgggatattgtatcatctaatagttgttatttatttagactaatttgtatttaagatttaaaaacatgtttataatgtataaaatttcctaaacatagttgatatgcaataagagtaatcttgtattactattaatcaaaccatgcagcattgcagtgttgcatgcaccaacatgtaacaaattatttaaattttttagcatgactagtgctgattacattacaattgatacatagcctcttttggtcgatattgatttcacctttagcactaaaattccttataaattagaaacctaaaagcttgaatgtagaaaatatctaacctctcttgcaggcctctaaaattgagattttgcacttaggcagcctgaggaaggttgtcttcatcgtccttgaaacatcttcaaaatcatccaaatctataaagctgagtaagaatatctcttcttcttcttccttagtgacaggtaatacaaacttattctactacggaacaccaaccaagagactaagtttctagcaataaaaaaatgcatcagtctttcatgttgaaacaacataattgccttttcatccttgctcatctcttcatcattctctccaaaccgatgactaacaaaagcattgctcttgtgccgcaacttgtactcccacaatatcgtgtccttccactgcatttcccacaatcacctccaaattgaaaatgcaattgcaatacaccgatcttgtgccccttgcccttctgcttcttgccgcagcatctcgaacagatagcaacaactagacgaggcacaactttggccggttccataactatgtaaaagttcatatgatgaagtactaaggaaattttgtgcctctgtaacatatgcatactaaatactacaaataactatcttaatctaaatattgaaaatttatatacttcacaattatccttttgaaggttagaatgagcctttctattaaatcatccatctgtggatgataagcactcttgaaagtatagcatatccttaactgagatgtcaaaacatgaaatgccccagccataaatgcaaaactattatctgagagaaaatctactctagataaaatactgaaacaccatttgcttaaggaggaagtatataaaagtagttgcagatgcattagcaagagtatcaacttccacctaatgaatcaaattgttgaaggtaataatgatgtattcattgttagtaattgactgtcagataggccctataaaatcaaatgcaaatgggaaattgcaatgacttcaatgtccttttgtaacatgaagaggagtattagaagcttggcactaaatgcaactacacacataacaaataacatcatattacatctttatctgataaaaagattttcaatcatatgacaatgtctcatatggctgcctaagatacgagagtcatagtaggcatcgagaaagtgtagaataaaaataaaagacaccataaatgatatttaggattaatccccacaaaataaagaagattgtctttaaaatgatattatgaatagaaatgctaaaagagcaaactattaacaagtgatgcaaaattctcaaacttattataaagcttttggattcacagctcaacttttcgagcctcataaacattgtcaagagaaggtaaattttgctttacaccttgtaaatgctaaatatcaaatacaacaattattgatggcatggaatccttgtctagaaagtctatcaatattggaaaaatatagacttgtcatgaacatgagaagagagcaaaaaatggacaagagttcaaaaaagagtatcaacattagctatagaaccctttaggaaataaaaaactttgaaattatatatttgaacccaattgagtagtatgattaatcaagttctttcactttaataatgaagtaattatatgataatcacttagtaatatatgaaaactatgctaatatgcataaaacttattaaaaccccaaactactactaaacacttttttattatggagtagttcattttttctagttacaatatacaactaatatatgcaatggaatgatattgaccagactcatttgcatcaatacacccccgagactgaaataagaagcattcacgcataaaatgaataggttaattataattagaaacaccaagattagaagaattatcaatagctttttgagattcataaacacctgcccacattctttagactagatgaaaaagaatgttgacaatttcaataatgtttgctatggttcaatataataaaaaaaacatgatcaacaaaacaattaagatgttacactttatttaagaagtgctacatataatttatgcattttggagtatgaaactttaaagaagtcataaatttgtcaaaatcaatttgtaaatcttcacaaaaaatacaagtccccaagataagtcatatccttaaacccaaatatgcatcttgactatttcaactttaaaccaacttcttgcagtaaatccaacatcatgcaaacattataaatataattctaccacatcccctctgagtaaatcaagacatcattgatgaagttattaatcacctttgatatatcataaagaatcttgttgaaaatgaagtattgttcaaactaaacgatatcattaaagacttatataagctaaatgttgtatgaaaaacaattttatgaacatttttcttggccattggtacatgtcagtactcaaaaacaaaatctaacttaatgaatcaatgattttttccaaaaaaatctaaaagataaacaatacgaagaaaaagatatatatccaggatactcacctcatttaatgaataatagttgatataaaattaaagactttagaactttgagacttttatataacacccttctttaatatcttcacatttgtgtgtaaaatcttgatctcctttagtgacaaacattgaataggaaccttgattggataaacatttttaattgaaataggatgatatattctaatgttggccctaaacaataagtcaaagttgaagagatctttgagctggtcaactactacaacataaaaaccataaaagggatttaaagagggaataaatgagtaaaatgaaaacacaatagaaagtaatatggagataaaagtgatagaagtagagataaaagtaaaaagataaaataaaataaaaatgaaaggaatagaagaaaaataaagggagaagcctcaaagtcacatttggtataattgcgttgtaattaatctatactaaggatgaggtcaaaaacttgacttaacataatttacaatacttgaagttcaatatcacccatatacatagctaagttcaccttattttgtatacatacaagtgtacaaccattgttatagagaatgaagattagctttgctacatgacataattataaatgataacatgtggcaacaacccaagcaatagaagataaacttgaacatatattaattgatatagagaataataagagacttcttgttataaaaacaagtttggaaaataaacattagatgaattggtggcaaatgaaccccttgatactcttaaaagcaggatggaagaacaaacaccatctactacttgtgcaactcctcgttttcgaaagaatctttgtatcaagactttatgttacaagatgttgttgatgccaaggcctccacctagaaaacaaaggatgccaatataagcaaccaaagacaacaacttgaaaaacaagttcaaatataaaaagaaaaggtccatatacaaaaatgcattaatttttctaatcagttaaaagtgttttaagatatttagggttaaacatttattaggtgacctacttatactggtttcatttgctttggttaggttttacataaggggtagtgtgtcaaaagagctacaacttttaacttccgtttacaaaggtatgaatttgtaaagaaatgtgatgaattagaagagaccagaaaaaataactttaaaaataaatataaagggaaagagcctatgaataataatacaccccttttttcttttaattaagagtctcaataacaatgtaaacctccatatgaatagaatcatttcctacaaaaagtaaaactgaaatatatgtaatgataagtgagaaaggtgctacctcataacattgtgttagtcacaaagcattgttaaaggttgttaaaacaaatgcatgcacaagtcttacaagatcttaatgaaatactagttacaacattttcaacttaatccactcctacatatttgactcaatataaagtaagaggccaaacataagaaggttttaatatgcataaatggctacattcaaccattatatcactacaatactatcctttggagacatgtgggaaactcaataaagacaacatcttaaaaatgattgaattaatagtacatatcctcctcaggattcctatagaaaaactcaagattggtagcaaaagtaggagttgcactatactccgtgaatgctatcatcaattcaagctaattgtacaactgcaactacatagttgaacaattacaccaattattactccagagtcaaaggagaaggagactaattttgccatgaagatgaatgaaaagaacaaaaacaaaagaaaaataattgaaaaactaaaagaaaagagaaatttagacaatataaaagttagatttaaaccaagagcataaatccaaacactcctaagcacaatcaaaattgtttgtcaccttacatagaatataaaaatagaagataaaaatatgcaccaaaaaccttaacttatatacaagagtgagactaccaaatcccactatattaataatagtatgtggcattatagccgcacacttaaacctcataacacaacttgtataaattaatatgattctgtaaaaataataaaaattaagaatttttttctcattaattaaaaatgtgtgcaggtttttatattcatcaagagtaagcaaaacatagagtagcatttggaagattggcaagcattcccttgaaaccaactatgacaagataagatgcttggcaccaccgatattcataggccacacgagtgtatgaatatccctgagacactatccaggccgtcaagatatatccgtttaggttgtgagccctgcgatgtatgtcagcgtggggagcgccatagatgcctgggcgacgtttgagagaattggcaccggtgcgaccgtgtgtttgaggctggaagaacccgatgtcccagggggcactgccgaatttgagctgagccgggacgccgtggaggattgcaaggagatggccggcaaggaggtgagcgacactccactcctggaggacgaggacggctggcctttgacagtggttcgcttctccgactcgctctaccgcatcaagaatgtggccgcggacagcttcccggagtccttggcgctcatggatttccacgcgcgccgtcgcgtgcacggcctctcgccccaggatttggctcgagcggacgaggagtacctgttggccaggaagatccctttcactattctcttgggcattcatcacgtctgtagtagcctttgatcttcttcgtctttgccatttacgtttgaagctgttcttgcagactctagactttctggggcatccagcagtggacacggttggcaaggtgatcaatgagacaccaggcaggccgaggctcttgtccgatctctcgctcgaggagattcaagccagaggcggacggcagtattaagttttttcatcgagtctcctgttaacttttcttctttgcatttgtttcttgcaagactgagaagggctgttttctatctttgatatttttaagagatttttttggggagtcaaaaaagaggttgagtgagtctaatccaagtttctgttgtttagaatagaaacgatcctttgttgtcgttttttcttggaattttatgtttgtgtccttccaggcgtgaattttttcgtatttaatgttccaaaaacaagctcctgaaattcataagaaggtgcatattcacatacatctatgtgtccccactaaataaaatataagttaacttaaaccattttaaaagaaaataatatacttactagactactggctctcacagctattctattaaaatatttttcatgatcaagcccttgctgatgacagaaagtctactcttcacaccataatgtcttctgtgcgccatcttcatttggatctttccactgccataatacttgacgatctagggatttccaagcatgccatccaaagtcatggctccataaaagtattttcttaatgaaatcttccactttgcacatgcaaaatcgtttggaaatgcattggctcccaagatatccatctttaccctcagtttatagttttttaccaactcatacacaataacccacagtccccacacgtccacaaccaacatgtaacttgctcatgatcctcaagctccatctctcttcactgccaccacctcatgcaccatgtacttcaatgttccacagttgacaatactgctgcatgtcccactacttgtttgtggccatgtcaaagtctccgatcaccacttcatccattgcagtggcattgagcctctcaaagatgtttttgagcttgagattgcagtggacaacccctctagagtgcatcgacttagcatttttaccaatgttttgggccctcggcctgtgtaacttgaaccttaatttaggctaattactttaaaaaaatcttttatttaaatcttggtaaaattctgctggctgggcaagctaattggactaagagacatggatagcgtgtactggctcgctggagttttgcatggcatgtttggagagaggtggtggcgatggggattccaacactccacgaatggattctctatcatatttcagtcccagaaaagacggcagcgatgcctagagtttcaacacagaaagaggtgttgctttgccacaaaattatgagctttgacaacgtttcgatttggacttccaaaatgcacaaactaacgcatggcatgaatggtataaaaagagctctcgcaagagaagaagaaaccaaaagaatggccgggtgaggatctgtttcacgaggccgaactccaaggtccaaggcacggcagcgtccagctcgagcactgatcacggcatccagtttcactgatgattcaagagcgtcctgtacctgtacgagctgccaagcactggctgcaacgacgagcttcaggggtgcagcgatgcggatagcgagtcccatcgccagaagctccgggccagcgctggctagccgtgatgatcccgatgcatcacgctcggcaaccttgccagcgatggtagcgttcgaaacagttcgggaggacgagatgattccatacgtggatggctttccatgggattccgcggaggagctggaacgtgcagcttgcgggcctttttctcccgaagaaatgaaggatgcagcgtcagaggaggtgcattttccatggcaagaagtggaagaccttccaccacctcacgaggccaacgatgatcaagcaacgacgacagcgccagctccaagcagaacaagaagaggcactgaacaagaagaagaattctatacatggaagttgaaggtgatgaggcatagatcgaaactagttcaactaatccggagaaacttattttagctgtagaaataaacattgtcttaacggcgccttttcttctttcgacccagctgaccggacttggcggccgcctcttgttcttccaagaatgccatggctttcttgtacttgtcttcacgctcctgctcggcctcggctcgttctttcagtttctccgcagccaggaactggttgtctttcctcagctcgcgagccgcgcctttggcttcgcgttggatttggcgccgcagcttcttcctctccgccctgtctcgatcaatatcgtagtctcttcccttggcaaaactgagaaagaagaagaataccaccacgttagaagaacaatcgtaaagcggcgactacgtactcttcctcaaacttcgggttgaactgcttgatgggagtcggtttcttcagccgcaattgcaaaggctgccgaaacttttctagctcctctactgtcttatggatgagctcgagcgtgtcgattatggttgcctttaaactctttgggaggagctttgaggaggacagctccagcagtacaggaacgaactgcttgaggatctcgggagtagacggcaagtcgttgtaaatcgttacgaatcctttcaatgtttggatggaagcattcaggatgccacacctgaatttaccagaaccgacttattaaacgacctcagcggtataaccaaacctgaaggagtccgtgtcaaagatatccaaatcggcatctgccgccattaactctgggaagtccgggtcgcaaaagcttttatcagaattgtcgtccttgagaagtaaccaaggccgacttccaacaagctctctcaaaaattgtggaccctggaaaccaccagcttacttcagaaaaagaaaatggtcgtacaaatttaccgtttttctggccgcggtactatctggcaggcccgtcgacagcagcaccaacaaaaagctcaaagcctctgggaaaaatctccgagcatgtttcatgatctatcaaacaaaagcaggtttaaaaacaaaagaagaaaaaatcggtgctcactgaaagtgccaatgagcatagaaaggctccaactccaacatctcggcctgaagtaactggacaacgcatcaaatactctcccaacaaaagtaccaatggtgtcatgactacatgccgaaagtccgatccaggaaatataagagaccaaagcctcatcaagagaagagttctcactgacggccagcagctgctttcatctccatctacactggattaaggtcgaagttaaaacaaaaatcgacattgaaacgcgcaagagcagcatacctttgcttcgtagcttgtccgacaaaacttgttgcatgcgtatcagcctttcacgtgcacacgcagctgcgtaataaggcgtctctaaactcatttcgatcaacggcttcgttagcatgttgattctatccagaggtaacggtttcactcccgccaaatccgaaatgtacaacaccaaaacattgtagaacacctggagcagaaaagattagtcagggagaaacagaaaaaccaagataaacaagtacctgcatctttttcctgttttcggccgctagactgatggcattacaagctctgatccgttgaattgccacccctagctcctcagttgacctgtgtttaaccagccccaggagctgttcgagagtctgaggtgcgttgatcacgaacggaagctcacgggactcttctatatctttgtcgtcactctcgtcttccttacgtaacgtagatttcgcctcctcgattagctcctccctcgtggactcctcactgcctgatgttccgctgtcttcaccttgtacagcttcatcgaagttagtttcttcttcatcatcgtcgtcgccattttcctcattgtcagtatcgctagcatctggattctcagcctcagtcctggccatgacttcgtccacccatcccttttcttgatactcctcttccagaacaaagttttcaccgagatcatcaccagatatctcagcacgctttctcttcttcttccgcttcgaacctccgtcgtcttcgtcggcctcagagtctgattcctgcgctccggtcattctttgtatccgttttttctaaagcacgcaaaagttttgtcagaaagtctacagaacttggaagattcattacgtgcctcgagctcctctagacgttctttttcctcctttgcaatctcttcggatgtctttagcctctccgaagcctgtgcgcgtatttcaaaagccatctccttcatcagcttgtcgtagtcatctggtttctcctgcacaaatatataagccaagtattgcaggacagtgtgtgaagtaccttctcggtatctgcgtcagaagctttatcattcttaatcgagcctttcgccaagagagccttcaaagtattaatctttttgggacgcatcaaagagagcagagctggcgtttcggccaaaactttaaaatcgctgtccagcttttctctgagatcaaggtcgtcttctttttctttggctttcacggcctgcaaataagcaaagttgagtacgccggtgtatggaccgaccaaatgagcataccttgaagtgcttgcttttggcaataacttcttccataatttctttctttgatcgtttctcctgataccaatcgcatcttaagagtgaaatcaccttgaaagaaatatagaaactatctaacctttctcgcgggatcagcgtccgtgaaaccacctccgaaattgagctctttttgtgctccggcaacctgaggaagctcttcttcatcgtctaacgaaacatcttcattaaagtcatccaaggtcgataaagctgctcccttgtgagtaagaagatctccctcttcttcttcttcttcctcagcgtcgggcagtgcaaacttactcttcctctggagttgagcctacacgaaagaccaaccaagagacttagtttctagcaataaaaaaaaaatgcaccagtctttcacgttgaaaccgcataatcgccttctcatcctcgctcatctcttcgtcattctctccaaaccgacgatcaacgaaagcattgctcttgtgccgaagcttatactcccgcaatatcgtcttcttccgctgcaaaacagttccccacaatcggctccaaatcgaaaatgcgggcattgcatacgaataccttctcaatgccgcgggatcgcaactcgccaatcctgcgcccctcgcccttctgcttcttgccgagaatgtcaaatttccgccgcgaccacagcgtctcgaagagactgggagcagcagcagccggacgaggcgcagccttggccgggcgcttcttcttggccatcgcttaaaccctaaacgtttagggttctagcatctattaatttttatcgaggtacatattaaagacctttaagccatggttataaatgttaagctttcatagctcagttggtcagagcacccgtttagtaagcgggaggtccgagttcaactctcggtgaaagcagcttgccgagcttagccagcgaaggtatagcgtttggcttcaccccttccatatcttcgcagctcaaacacttctctacctttgctggcaccagttcgccgcagtgggaagcaacagtcgaggagcgtgacgaaagttactcaatccggctggaaaccttctaaatccatctgctgaaacagctcccaagtgccttgaattccctgctcgttctgggagcacgtagacagcatcgagttccaggacacaacgtccctcttcgcgtgagacaaatcaaaaactccttttggcgctgtctagccttcccatcttgctaaacaagttgacaagcgcagtcgccaccatcggatcattatggaaaccatttttagaacgcgatcggtgattgtgattatgagcttcgaccctgctgcagcaaaagaagaaaaagaaacatcagtcagcatccaagatgctaacaaaagtcacctcgatcgcctcgactccttccagatctattttctggagctgcctgatcgcctcccagagaaaacgctgctaccgttccggaccacttcttttcgtccagtttctcaacgacgacgcttacacagagacctccttctgaaaacgctggaagatcttgaagccggagttaagttgttcctcttccagtgttcctgggcagagacaccgaaatctgtgggtggtccaagcacgcccatggttttgctttgttatagttgcgggtatgtacaccagtatggaactcttggaggcgttgtttacctggaaaacggcgcaggtatggcttttctctcttagctgaaagttgatcttcgttttcagtgcaaaaggagctcacttccagcaaaatcttgctcagtaagaggaaatgatgtataaaacaagcacctgaggaagcctcagattcttatattgagcaggatctcataaatctaaccccctgagcttctcttcaaagcccatggttggcatcattcttgacaatgatcaaatttaaatcgaatctttgactagaactagttttggacaaacacaaagatgcgtgaatgcgtgggggcattttggcggagctcgctagagtggattgccaagccggctacgcatcgctcctccagagatgcgcggatcccaggctcttgcccgaggccaagctcctccactcccacatcgctcgccatcccctccactcgcgcagcctcctcctccgcaaccacatcgtccacgcctacgccagatgcggcagcctcgccgacgcgcgcgccgccttcgatgccatccccgccaagaacgtcttctcctggagcatcatcatcgctgcctacacccgccatggccaccaccgccaagctctggatctcttcgaccaaatggaggcgaatcccagcgctgcgccgccgcccaatgccttcgttctctccacggccctcggcgcctgctcggcgctgcgcgatctgggccgcggcgagcgcatccactcgcggatccagcagcggcggagcgatcttggagggaatatggtggtgctggaaaccgctctgctcaggatgtatgctagctgcggctgcgtagtccaagcggaggagatcttccaggcgatgggcgagagggatgtaatcgcgtggaacgcaatgatctctgcatatgcccacaccgggcatcacacccgggcatttgggatcttccggatcatgctcctcgaggcggcggtgacgcccagcgccgctacaatctccgccatcctcgccgcctgcctcgatctgggatctgggaggaggatccactgcttagcggcatcgatcggggtggagtcccatccatcggtggcgatctcgctgctgggcatgtactcgcgatgtagcagctccatcaccagcgctagagcgctgttcttgggcatggagaggaagagcctggtggcgtggaacacgatgatcgcggcgtgtgcgcagagaggtctagcggcagaggcccaggagctgttcaaggccatggatgtggagccggatggattcactttcgcgagcttgctggcggtgtgctgcgatctagacctcgggcggcgcctccacgccgggattgccacggcgcgcctcgcttcgcgcttgatcgtggacacggcgctggtgggcatgtattcgcggtgtgggagcttgggcgatgctgcggctgtgtttgagggaatggaggatcgcgacacagtcgcgtggaatgccatgatcgcggcatttgccgaggcgagagatctagatcgggctatggaatgctaccagagaatgctggatcgatccacttgtgagcccaatggggtcacgtatgccacccttcttgctgcttgccgtgatcgaggtgatcttggccatggccggcgccttttcagggatgcccaggatcgagggctctatcccgatcgattcgtgcaaagcgcggcagtggcgatgctcgcgcggtgtggcgcgatctgcgaggccaggaaattgctgcgggaggccaagatcagggacgtggaggcctggaacgcgatgatctcggcttatgcccagatgggtcatttgcgcgaggctctgggaatctaccgggagatggaacacgacggctccagcagccccgatctcttcacctttgcaagcgctctagctgctgcagctgggcttggagatctggacaccgggaaggtgatccacgagagaatggcggccgaaagatcgctcaagctcgacgtcttcgccgcaaacgcgctgctcaccatgtactccaagtgtggcagcttgggcgatgccaagctcgtgtttgatcgcatcccggacaaggacacagtctcctggaactcgatgatctcggcctacgcccgccacggccgctacaaagacgccatcgccacgtaccgcgccatggagtgttgcccggacgaggccaccattgtgagcgccctcgcggcagcgtcggctctcgcggatctagacgaaggagctgccatccacgcccgagctctcgagctcgggatcgccactcctgtggtggagtccacgctcgcaagcatgcacgccaagtgtgggagcttggacgcggccatggcgctcttcgagaagaaccgcgagaaagatctagtctcctggaacgcgatggtggcagcgtacgcgcagcacggagatggctccgaggcgctcgcgctgatccaccggatggagctggaggggatctccccaaatggagtgacgctgtccggggtgctggcgtcgtgctcccatgccgggctgctcgagcgggggatgttctacgtggggtggctgagccgggagcacggcgtggcggtggagagcgagcactatcggtttgtagtggagctgctcgggcggtgtgggaggctgggcgaggccgaggcggtggtccgcggtatgccgctggagcccgaccccgcgctgtgggtgacgctggtggccgcttgcgtgctccacgaggaggtaagccgcgcggaccgtgccgctgcggggttggatcctggcgacgctgcgtcttacgtgctcctcgccaatgtatattcggctgggatttgatattttggcgggaagttttgtagtcggggttagagtctaggctgcgttcctggatgctgatcaccagataccacttgggaagcgatggtgaaatttcagcatccaggaacgcgttcacttggagttcatatctgtgccgatgtttggctttgttgatcctatggtacagtttctcctaggcgacttgtttctgcttcatcgaaaaaagatgagacagaagtcaatgtgcaaagttcactggaaggaaataggaagcgagtgttatctccgcagccaggagacaagggtgcgaacttaaaacagacaagaagtcacaaaagtgtcaaggtactgataagtttttaattatatttttcttcttttgacaaatttttatggacttagtaagtccacaaaatgtttatgtctacgattcgggaccaagctagagcttaagattgtgtccaatactctggaggtacttcacctgagagaagaagaacgggaccaagctagagcttaagattgtgtccaatactctggaggtacttcacctgagagaagaagaaccagtcagaggcttcatgactttgtagaggtttgcttggacgaaaaaagcataattcaccaaatctagagcataagtacaaatagcttcctcatgaattgcggcaagaatctaattcttttctttacgagtgccaatctacaccagtcgggatccagctcagaagaaaatcaaaacaactcggacttgattgccagcatgatatctctgctacttccaaatgctgtctctcatgaaaaaacgttcaaaaagaaaacggagacaaggtctccccaagagagatgtggcgcaaagtcctatagacttcgggatgggtaacacggcattggaggcctccgtagccaaagaccaccccattgagcaagccatgacagcaaatatctttgacaaccaacaggaagctcttactgaccttgacaagcggcttaccaccgcagttgagcctcaagctggagaggtgcccattgctgaggagccgagcaaccaagttgacaacgcggaaaaacctcagcaaacaaagaatatcgatgaggacacacaatgtgcgggcggaaacataatcgagaccacagtcatcgtcaacaagctcactagctcgaatgagcttgaacaagtcacaatgcagcccagccagctcttagtaaagcaactggaggctgtcaaaaggattcgacaatcacaacagccaatgctttggacgaccgttgtgctgatttggacagcaagcggtacattatctcggacatgctgaagctgaagaaaagttccaggatctcggacatgtcgaatcacttgatccagcgtgcgtgacggatagtatacttcggcccccaacaatgctttatacctgaagtcaatacatttcacaggcgctggttccatcgagctacttgatctagaaattccagcatgcgtgacgaacagtcacacttcgaccgaacaagaaaaacaacaatgctctagaccacaagtccggttccatcaacgaacaagcagtatctatctactatggctcaagcaaaggatacgtggactaaaccggagcctgctcaaaatgattccgtagccaacgatttggccaagcagtcgagaatacataccggctttagttccatcagccaggctcggacatgctaaaacccgtcgctgcttttgagcacgaactttcagttctttgcgtggcactcaacgcaaggagtcaggaggtggatatttgcggctcttgtagtaaagcacggtatacaattacatgcataccgtgtttttggagcagaggtttgttctgtgtttttttcatcttggtacatttggcttacattatttttgcagctacaagcggagtttggaatttagctcactctagatggcgacagccttcatctccagcaccgaccaaagactgttatcaagagaaaccaccctatgggaagcttggggctatgaacaaagatgaatgttgtgtatccaagaatggcgcatggattgaggtaattgtttttcatgtttgcattaatcatgtcctattcaggcattctctgtatgaagcacctgcaagatatagctggaagacttttcagagcatttttaaacctagccatagttcctcatgaacctaggatggctaactttgatgcatacctttttatcatttttaaatctattgttcttacaagaagaaaaatctgaagttttacagaattaattaaatttaaaatttatatattttgcactttcaaatttagaggagagagttataatatagggaaatgtaaaattatgtcactttaaaaaaacataatttaatatgtacaaattaaattaaaaacatattctttactacttgggcaaggtttttttgtagggtttctttgttgacaagctgctacctccatcactctatctcgctgtaatgcaggtattagtaagtcttaagtatatgattattcttttatctaataatatttttaaattaaatatataaaacctttaattaaaagataagtctttcttttttcatgcatttacattcaagaaaaacttaaatgaataccatcatgaactataatttatattattttataaagaatatataaaattatttaagatttattattgacttggataaaaaagtatatagggttttcagaacaattatagcttatttgctattagtggttgtaacaaagttaaaaataattatacattaaaataaaatatatataaataaacaaacttggcattatgagtgcttggaatatagaaagggaatacaaaaaatgtgcatatcaattaacccaaaaaccctagcttatatacaagagcaagtggtccgaattgaaaccaattcgatggctaccaaaatcccactatgttaatattagtatacagcattgtagccgtacacttggccctcacatcatcccctcctctcggaataatggaagaccatcaaaattctcttataaatatactaggatttggaaaaacgtcaagaggaagcatcggcagatctataggtggtattaactgctcctaatccctttgtatgaagcgtttcaactgttgcatatgcacaatctctggaggatcggcctactagatgtcatgccaaacctcataaacttgtggttcaacttgccgcaacacctgatatggttctttccactactcaagaagccctttaaataaaccatatactgtaagatggggaaaatggactaacacaaaatcatccactttgcatttcgcaggtggacgatgatgggagttatagtgccgttgttgtcccacttgtatgcggcttaagtgttcagtagactctgcttagacaagtggaagaatgctcgtcaaatactgatatcatgacctagcatcagtaactcatggcaattgcgaaggtaaacccaacttggttggtaatattggatcatgattatataggagtttatatggtgaaacaccaatagaactatacacctttgtgacatatgcataccgaagagacggcaaataaccatcctaatccaaatgctgaaagttcacatactttgcaatcatttatttgaatgttcgaacaagccgttccaccagaccatttgattgtggatgataagcactcgtgaaagtgcgacgtatccccaaccgagacgtcaaaacatgaaatgcctcaatcataaatgtaggactattatccaaaagaatccattccgaacaagaatgctgaaacaccactcaattgaggaggaagtatccaacagcaattgttgaggcgttagcaaaagcaccaacttccacctaatgagtcaaataatcagaagtaataataacatattcattgccagtagtcaattgtggagaatgtcccataagatcaaatgccaccaactcaaagagatgggaaattgcaatcgactccaaccgtccttctacaacacgagggggagtattacaagcttggcaccaaatgcagttatgcacatacaagataatatcacgtcacatctctggccaatagaaagacctatgcagcttctcggttacatgacgatgtcccatatgcccacctagaataggagaatcatagtagacatggagaaaccacagaataaacacagaaggcaccaccagccgtaaatgatcatcaagatccgtccccacaaaataaagaaggccgttttcaaggcgatattgagaatgtaaatgccggaaaggcaagtcatcaataagtgatgtaggattctcaaacccattttgaagccttcgaatccacggctcaattttttgagccttacgaacctcatcaagaaaaggtagatcttgctttgcaacttgtggacattgaacgttaagtatagcaaccactgatggtacagaatcctcatctagaaaatccacagatgctagaacaacaagctcatcagaaacatgagaagagagtggaaaaggaagaggagctcgagaaagggcatcagcattagccataaaactccttgaatgatgaataacatcaaaattatatatttgaagcttcaaagcccactgagcagtacgaccaaccaagttctttcatttaaataatgaagtaatggcaacatgatcaccttcaagtaacatccaagaaccatgtagatatgcataaagtttctcaaaaccccaaactattgctaaacacttcttctctatcgtgggatagttcacctccgttagttgtaatgtatatcttatatacacaataggatattcctaaccaagcacactctggttctcttgcatcaacacacctccaagaccaatgttagaagcatccatgctcaaaataaaagatcgagtgtagtcaggatatgccaaaacctgaggagttgtcaatagctctttgagatctacaaacgcccgctcacaatccagagactagatgaaagatgacattgatgatttcagcaacgctcgcaatggtgcagtgtgataaaaaagatgatccacaaaacgactgagatactgcaccttgctcaagaagcactgcacatcattcacacacttcagagtagggaactttagaacagccacaagtttgtcatgatcaacttgcaaaccctcacgagaaatacaatacccaagataagttgtatattttgatccaaacatgcacttcaaccacttcagctttaaaccaacatcacatagctgatccagcactttacaaacatcacgaacgtgcttttcccacatcccctccgagtggattaagacatcatcaatgaagtcagcatatcacaaagaacctcgttcatcatctgttgaaaagttgctggagtattgtttaaaccaaacggcatcaccaagaactcgtacgaaaagtagtcttaggaatatcttcttcgactattggtacttgccagtgcccagaagcaagatctaacttggtgaactaacaacttcaccccaaatgatccaagagattagtagtgtgaggaagagggttcatatttgggatcgttttttcatttaacggatgatagtcgatgcagaaatgaatactctcatcaggcttcgtcacaagatgaggttcatatccccaaggactccacaacttctgaataacacccttctccaacatctccttaacgtttgtatgtaaaatcttgatctccttgggtgaatgatgacaaacagaaaccttgattggatgagcatccccggttgaaattggatgacgtgtggaaatcttggccctagatgataggtcaaattcaaagagatcaaaatattccttcatgagctggtcaaccgctgcaatacaaagattgtcgaagggatcggaaaaggaaagagtagaacaagacgaaaccataggaggaaataatgggggaacaaaagtaatggaagcaaagctagaagtagaaggacaaagaggtacggaagtgagaggaatggatgaaacataaagaagtatgagacaaaggggaaaagcctcaaagtcacacttggcatgattgcactgcaaccaatccataccaagaatgaggtcaaaagcttaactcggcaccacctgcaatgaccacaactcaagctcaagatcacccacacacacaaccaagtctgcctcatcccatgcacatgcatgtgtatggccattgccataaagaatgaaaactggtttcgccacataacgcaagtgtagatggcaacgtgtggcaacaggtcaagcaatagaagataaacttgaacctgtatcaactaacatagagagaataatagaagacctctgttataaaaatgagcttggagagtaaacactagaggtgccgagtgaaccccttgatgatactcccgaaagaaagatagaggggtcattgacttattcgcacaagatctctccattacttgcacgactcttcatttctcagatgtatctcattgtctagaccttccactacagtaacaccaatgggacattgatgacgccaaagtctccacctaggaaatggaagttaccaattagaaaaacgccgataacattgataagtatgaccaacttcatcacaagcccaacagtgaacatcacaaccacgaccacgtcctcacccttgtccttgaactcaagcatcagtagcatcaacctccattggaacaagaccatcacccataggaagtggagctaaagaacatgcaacaagaagtggaagaggtgatgtctcataatgttgtgctaagtgaagaacatcgtcaagggtggcgggagcaagtgtatgcacaagtccgacaatatcttgatgaagtgctaggcacaacattcctagcttgatccgctccgacacatttggctccgcacaaagcaaaagactttggaaatgaactctaaattgcattaccaactcagatggccctaggcgaagacaatgcaattgttgaaaggcatcatcacagtcatcggcatgtctgaaggtgcgtttgaagatgtccacgagaacactccaatcttcgcgagtggctgcactcaaaccattgtaccactgcaatgctatcccttggagacacgtgggaaactcatgcaaacgtcgagcatcatcccaaaaatgatatgtggcaatcaccgtgaagtgattgaaccaatggtacacatcatccccaagattcccatgaaagaactccggctgaacacgaggattagaaccaagagcaggaggagttgtaccacgtgccgtgaatgctgccatcaactgagtttggttgttcaattgcaagcgtatagcatcaagcaattgtaccaactattcatacacgatttggtttgtacgaattcttgatgatgccatttggtttgaacaatgctctagcaactttccaatggatgatgaatgaagttctttgcaatatgccaaaagtgactgttgatttcattgatgatatcttgatgcacttggaggggacatgggaggagcacgtttgtgatgtttataaagtgttggattggctacgggatgttgttttaaagctgaagcagtcgaagtgcgtgtttgggtctaaggacacaacttatcttggatactgtatttctcgtgagggtttgcaaattgatcctgacaaatttgtggatgttcgaaagttccctactccgaagtgtgtgaatgatgtgtagcgcttcttaggcaaggtgcaaaatcttggttgttttgtgtatcatcttttttatcacattgcatcattgcgagcattgctaaagtcatcaatgtcatctttcatctggtctccggattgtgagcaagcattcatggatctcaaagagctattgacaactgctccagttttggcacatcttgaatacacttgaccttttattttgtgtgtggatgcttctgatattagtcttggaggtgtgttgatgcaagagaaccaaagtgtgcttggtcaggaccatcttattgcatatataagccatacattacaaccaatagaggtaaactattccacgatagagaaggagtgtttactaacaatttggggttttgagaaactttatgcatatttacatggttcttggatgttatttgaaggtgatcatgttgccattacttcattatttaagtgaaagaatttggttggtcatattgctcagtgggctttgaagcttcaaatatataattttgatgttattcatcatccagggagttttatggctaatgctgatgccctttctcgagctcctcttccttctccactctcttctcatgtttctgataagcttgttgttctagcatctatggattttctagatgaggattctgtaccattagtggttgctatacttaacgttcaatatccacaagctgcagagcaagatctaccttttcttgatgaggttcgtaaggctcaaaagattgagccgtggattcgaaggcttcaaaatgggtttgagaattctgcatcacttattgatgacttgcctttccggcatttacattctcaatatcaccttgaaaacagccttctttattttgtggggatggatcttgatgatcatttacggctagtggtgccttctgtgtttattccgcggtttctccatgtttactatgattctcctgttctaggtgggcatatgggacattgtcgtgtaaccgagaagctgcacaggtctttctattggccagagatgcgacataatattatttagtatgtgtatagccatgtttggtgccaagctcgtaatattccccctcatactgtagaaggacaattggagtcaattgcagtttctcgtccctttgagttggtggcatttgatcttataggaccttttccacaatcaactattggtaatgagtatgttattattgcttctgactatttgacttattgggtggaagttggtactcttgctaacacctttgcaactattgttggatacttcctcctcaatcgagtggtgtttcagcatttttgtttggaatagattctttaatagtcccgcatttatgactgaggtatttcatattttgacatctcggttggggatacgccacactttcacgagtgtttatcatccatagttagacagtttggtggaacgactcgtttggacattcaaaagaatgattgcgaagtatgtgaattttcagcatttggattgggatggttatttgccatctcttcggtatgcatatgtcacaagggtgcagagttctattggtgtttcaccatataaacttttatatagtcttgatccaatattaccaatggagctaaatttacctttgtaattgccatgagctaccaatgttaggttgtgggatcagtatttaacaagcattcttccacttgtccaagcagagtttgttgaacacttaagccacatacaagtgggacaacaatagcgctacaactcctatcattatctatttgcaaagtacaaagtagataatttggtgttagtctattttccccatcttacggtatatggtttatctaaggggctctttgctcaatagaaaggaccatatcggtgtaagcgactaatttttccattctactttagtcacttaaccacacctccaaccacgtggaggagtctcattcacaacctccataagtcctatttcggacttgggcttgctagccccgagaatggcatccccgccactcaacttttgcacatggtccaagtgctccatgtgtttgatcccatgaccgacaccccaaggtaccattgacatatccgcctgttacactaaggccatgcccctttaccttggtcacaccggtggtctaacaccacctgcatcacagtcccgtctctcaaggactaggccatccgtccatgagtgatcattctagatcccctccttagtatccttaggatgcccacagacatggggaacaaccttccacaatatccctttaacagtccccactaagatccttttctgtccatggccgtgttcaccaacactgccactggatcaaggcccataggcccgaccattaagtcccactgtcctctgggacttcctcaccacatgaccgtgtcattagtcaccacaccaaaggatcattagttttcctttccatagtctgggactttgggatagcatttcggaacaccgcagccctacgcggacctcctgggtactctccccaccttctgtctttaggtgctctagccatgggcttagagcgaggttccgttgagccacacctggtatccaagtaggtagtgccacccacacttggactgggagcatctgccagtcaatctcccgggggaactagagctggctcttgaacacttcaccaagctaccccgcttgtcggtccatgttcactctagtcttggacttcccaatgggcagctcatcacccaacactagatatagcctttttgggccaaactggcctttcctggccaaactggctccactgcagtcctcccccttactatacttttggagctcaccaaaccccccagggtctgggagacgaacactttgggctttcaccctttcagacttgaactcagactcggactcggactcggactcagacttggactcggactcggactcggactcggactcgggctcgggctcggtctcggccttggccttggtcttggtctcggtcccaatctcggtctcggtgccagtcttggtctcgacctcgagctccatctcgggtccttctcggactccatcttggactccatctcggaatccgtctaggtccatctcggactccatctcaggtccatctcggactccgtctcggtccatctcggactccatctcaggtccatctcggactccatattggactccatcttggactccatctcgggtccatctcggactccatctcggactccatctcgggtccatctcggactccatcttggactccatctcgggtccacctcggactccatctcggactccatctcgggtccatctcggactccatctcgggtccatctcgaactctatctcaggtccaccttggactccatctcgggtccatctcggacacttccacgtgtcatgtgttagtcctttttggagccttgcttattggttgcctcgtgctcgctcctcgagcactttgttgggagttccactcccgccctcgaccttccaagttggagcttttagtccaaacgtgttacgcttgtttggcttttgcctcggccactaccacgtggcaccctttctggctctactttggggcctagggattttgtgtctcacaatcaggtgttgcagcaagttggaccgcaagtttatgaggttctgcataacgtttagtaggctgatcctctaaaaattgtgcatgtacaacaattgaaacccttcatacaaaaggatcaggaacaattgaggtacaacaatacatatataaatctgctgatgcctcctcctaatgttcttccaaatcccggcccatctacaagaaaatcttgatggtctttcattattccgagaggagggatgatgtgaggtctaagtgtatacttacaatgccgtgtactaatattagcgtagtaggattttggtaaccgtcggattggttttaatccagacctctcgctccaatatataaattaaggtttttgggctaattgatatgcacattttttatattccctttccatattgcaagcactcacaaaattaaactccaattaacatgttaaaaccccaaacttttagatggccaaaaaagtctctttgacttgacattctcaagaaggaacagaagggcaagtggattggcatgtctctgtattcgatttggagaagatgcacttgtccatgcatttgatttggaggagatgcaattagctttgggaaattgttttacagcagaatattgctggagtaaaagctgcagcacaagagtaatgctttcgttaatcgttggtttggagagaataagtgaggtgattacactgtttcaacgtggaacacagcatttcttttcattgctagaaacttagaagaatgactggaatgcaggaatcagactctgagactgacaaagatgacagaggttcgaagtggaagaagagaaaacatgatcatgctgtgtgttaaacagagatcaactgaggagcttgggtggcaattcagtggatcagagcttgtaatgttggaagtctagtggcggaaaaacagaaaaaaataaaaataaaatgcaggtacatgcttgtgacaggatcataactgatccattcctgtttacatactttttaaacttaccagagaacatcaccacaaagcacaattagagctacctgcccctgccttgatattgagcaatggatgatctgccttgatacatttaatcaaggcacccagtttgttgtgcagtgttttatggatcaccaagagctcaacctttgatgctcgttcctagcgataacaagaaaagagatttttattaaaaaaaacttgcttgaaaacaattaaagtttactcactcggaaaaactccagcgttgcagcagagattcgagggcagcaatcgagattcaagcagtaaagagagttgctcaatcgtgggacgagtattgcaacagcctcatcgtcgataagcttgcatccgaaaagattcagagccctcaagcaaggacaatggaacgcaataaaccttatagaaatctttgatcatggagaagtgtaaacgaaaaagtgaaagaagcatttcatacctcatggatctatgggtgatgttggtgcaattaacaagactcataacttggagcttgttgcatccttctaccagagccatgattcctttgtcttgcacattatatgcacctgtcttgcgagagcgttgattgagctcaaactcaatcagatgagagcaaaaacgtccaaactgtacaaggatattgtcactggcagttggaaggcaaactttctcaaggttccgaagagcaaatggaattttacagagagccttctcttctaactgcaaaggcacaatggatgtgtttcgatcaacataaaacaaagtaaaaatggaagtatacctgtgtaatcacaacctcatcacaagtagataaatcgaggaccttgagattggtgcatgctttacagattgcttgccacgttccactaaacgtagattccgcgtaaagggcttggagctggcggccactgtctttaatcaacttccagggcgcagagcgatcataagcaacagagagtccaggggagacacaaagcctgagagacgtgagagaaggtggcattgggctgatggaagcatgatcgagtatcaacagatcggatgatacaacaccaagatctgacaggtttgagcagcatttgaatatgttattgacatgatcccaaccaaagtcactgctagagatatggagcgtggtgagggacaaagtgaagcttttaagcgtgacgccaaggtcaccgttaggccaagtcacactcgcacccagaagcttcagtgtgtggagatgaggacatcgagaaggcaatgcaaggaaaaaactagacacatcatggtctcggctgaaaacatccaggctctggaggtgaggtgaaagggcctcagcaagatatggagggaaattatcatcagaaaaagcggcagagaggtggcgaagatgaggaagggcagagacagtagagacaatcttctctgcgtccttctgcgatctggacaagattataagcaaggatttagcgcgagaagagccatacataccgaggaaaagtaatgcttgtgatggtcgatgcgtgcttgcgcgctagtttgatgacgtcttttggtttgagccagaccgaagaatgcagccaccgagagaagtcaccgaaacgaggcacaatctcacgcacctatcgagaagaaataccatgctccatcagatcaactcttatcttcttcactaaccacagaactttacttacatgagattggcacaagcgattccagcggcggcagacaagcgcggcccgcgtgaggagctccctcgttgaaatgcgatcgaagatgtggagcagggtatcgtcatcgaggccgccagtggtggcatcgtcctcgccatcgccatcgccatcgccatcgcgagccctcttccttctcgttctccccattttgctactttgacctaatcttatgaaccatgtggttaacaaagggcaaaggcgtccgtggcgatggcgatggttttcgtcgcaatcgcatggcatcgttcttgacaaggaggaggagccgccgctcgatccaacgaagatttgcagggatgacgagcgatcgccagcggtggacgccttcgcggctgctctgcgagaatgccgcgagcgcggatccctgggcgagggtaagcgcatccacgcacagatcgtctccagcggcctcgagcgtcacaggttcctcgcgaatctcgtcatggaaatgtatggaaagtgcggccgcgcggcggactcgttggaagtcttccacaagatggaagatcgcaatgttttctcgtggaacattgcgattgcggcatttgcccacaacgggcaaatgcgagaagccctgacgctcttccggcaaatgctgctcgacggcgagcatcccaattgcgtcacgtttatgggagctatcaatgccgatccggccaaggtccatgcactagtcgtcgctgctggcctggatcgctccacttccatcgccacagcgctgctcaacgcttacggcaagctggggatgctagatcatgccacgctcgtcttccaggggatcgaattcaaggatgccatcacctggaatgcactggtatccgcgtgcgctcacaaccatcgtggatcccaggcgctggagctctttcgctcgatgcttctcgaaggtatcaagcccaaccacatcacctttctcagcattgtcgccgcgtctagctcgatcatggatgatcgtagctcgactgctcgcgaggatcttatgcactcgctcgtcgtggaagccggctatggcgaccatctctccatcgccaattgcctcgtggattgctactccaagcgaggatcattggacaccgccagagcgctctttgattccatgaagcggaaagacgtggtgagctggaacacgatgatctcggcttattctcgatcacaggatggagaccaagaagctctcgatctcttccagagaatgctggacgatcccagcggccccgagccggatcgactgacgttcttgagcgttgtggatgcatgcaactcgctggagcagggcaggacgatccatgctctcgcgatggagaagaagatcgctagcgaggacgtggtgctccagacggcgctgctcaac

SEQ ID NO: 14853 - DNA, 23231 bp, Selaginella moellendorffii
  Intron number 1 from transcript 10313 (locus 10313) derive d from phytozome v7.0 (chr-ID scaffold_49; pos 646952 to 6 70182)
ccagggcagtatttgatcagttaacgcacaaggatgtagtgtcgtggactgcgatgatcaccgcatttgcccagatgggggattgccgctaggcgctcaagacgctcgaggggatgatccaagctcgcgtccagccaatccggtaaccttcgtcgcggtgatcactgcgtgctccagcatctcgatcagggcaggaagatccacgacgccgtgatcgacctgggcctccacagcgacatcacgatccagaatgcgctggtttcgatgtacgcgaagggtggcagcgcggaggaagcacttttggtgttccagaggatggaagatcgcaacagggtctcgtggaacagcatgatcgcagcctttgccacgagcgcaaagtcttgcacggcgatgtgcctcttccacggcatgaacttggaagggatcaagcccgacgacgtgagctttctgggagttctaagtgcctgctcgagcactgggtgcttgcgatcgtgcaagcggatccactcgcagctggagctcgccgcggtgcactctcctccggatttgagcgtggagaactcgcttgtcactgcctacgccagatctagaggccgctgagaggatttttcagagaatcccaggcaagaacgtcgtgtcctggacggccatgctcactgcttacacctttcatggcaatggatccaaagctctcgagctctacgacaagttggtcgggcagtcgatccagccggacagcgtggtgctgctcaacgtaatccacgccagatcactggtcggggacattggcctcacgagaaagctccacgctcaccttgcttcctccagcttcatgctcaagatccagatccagaatgtgctcatcaacatgtacgcacggtgcggcagcctggaggaggcaaggtgggtgtttgataggttcgagaggaagaacttggtgtcatggaacgtgatgatgggatcttatgtgcagcacagatacaacgaggaagcgattgcattgttctcagagatgaaggctgagaactcgaggaccatggagtcgggctcgagtagctcggtctctgtgagctcggactctagtttgtacacaaagagtgtgaagagctcggactccagtaacaccttggcctccaccatctcggactcgattctaaagcctgattgcatcatggccgtcgccagcctgggcaagctcgccgaggggcagcgcatccacaccgagctatgcattgcgaattgggagattctcgcgggatccacaaccaacatcaccctgggcaatgcactggtttagcatgtacgcgtgctgcggcaacatgggagatgctgccgctgcgaaagcttggcatatctaacttgaacactttggtgcaagtggcaccaaaaacgtggtgaatgagatggggacactcagtctcagttgctatggacccttggccggaaggggtagcttgggtgcactgccaagtgtggaggatgcccccgaggtcatggtgaataacttaaaggtctggaaaacctaatacctattggtaaacctgttaatgtgccaagatgagatcactcggtgatcttgtggctaaatagggacaaggtccttatttgggtaaggaataaagttcttagttcaaagtgttaatttaaacaattgataatggtgtggattggtcaaggtgaccaagtgggaagaacacgtaagggaaatgagttatgccaatgcgatagcatagtaagttcgaggaaagtagtctttataagggatccatgggagggtctcaaagttaggccgtggatagagccaatagcagaaaatgttaaaaagacgtactaaaggtgaacaccctctgaacttggcaaagcaaagtgtttgctatagaaccaaaaagatacctaaagaatggaggtagcaatcttatattgctaggtgcaataatcaaggataggagcaaaagactaagtggctaaggaaagagccatgggaatcatggggaagaatccaaatggcaaagttaggccaaaaacactaatgtgttgagtgctaacggattgggggaaaaacaatgtgtttctaaggatggattcttaattactccaatatggcaaactgaaagctccaagggagggagcagtaaagtagccaaatgataaagccgtggacagctctagcacaaattatgataactagaacttagtgccaaaggtagcacgaaatcgaagagaggatgatggtgccctcaagtagagaacttcctaggatgggaaagtggagttgcacaatatgtgcaatgcaaggtgtcggagacacccagaaaattgacttcgagaagtcagaattaaaagttccaaagtgcaagggttatatcgatggaaattgaaactactcaaaaaggagtagtgggattgggttaaaaaaggtgtctttaacaggtttagcgagaactaaaccaataaaaggaaagaaccaccacaagtggtttaatgagtctctaagttggagagactatgtgccttagagggtgaacaaagcatggtgagccttcggtgtcaaaccattgactaatattgacgaggtgtcaaggagggaaagggtaatacatgttggtattactttatgaaatagtttatcatttgatgaggatatcaaacttcgtctatgggtggtggagttgttagacacaagatccctaggccccaaagtggagccggaagggtgccatgtggtagtggccaaagcaaaaaccaaacgagtgtaacacgtttggactaaaagctctgacttgatgtaagctcctgagtttggacttcccgggaggtcacccagcccagtactattcaaacccaaggacacttaactccaactatcccaagacccttaaccgtttggaaaagggggtgcactcttattcatgggccctttccctctatatttgaaccccaacggatcgtttctcgagtcgttccctttggttgcttacaatccaccacgcttccctgcaagttcatgccctcgtgaacggaagctgagagccgcagctctcccgagagcctcgctctcttgacaccctacccctcgggtcgagcccaacgcgagcaaactggaccagccagatgtcaatcaacatgtggtgtgattcccttagccaaccaacagagtcggacccgagacccctctgataccaaatgtaagctcctgagtttggacttcccgggaggtcacccagcccagtactattcaaacccaaggacgcttaactccaactatcccaagacccttaaccgtttggaaaagggggtgcactcttattcatgggccctttccctctatatttgaaccccaacggatcgtttctcgagtcgttccctttggttgcttacacttgaaaggtcaagagcgagagtggaaatcctaacgaagtgcttaaggaacaagcacagagcaagcaataagtgagtctctagaaaagggacacaagaggaccaacatatgacatgtggaagtgtccgagatggagttcgagatggagtccgagatggatttgagatggagtccgagatggagtttgagatggactcgagatggacccgagatggagttcgagatggagttcgagatggagtccgagatggacctgagatggagtctgacatggagtccgagatggacccaagatggacccgagatggagtccaagatggagtccgagatggagtccgagatggatctgagatagacccgaggtggagtccgagatggagtccgagaaggacccgagatggagtccaaagtcgagatcgagaccgggaccgagaccgagaccaaggccgagaccgagaccaaggccgaggccgagaccgagcccctgcccgagtccgagtccgagtccgagtctaagaccgagtcagagtccgaatttgagtctgagtctgagttcgagtctgagagggtgaaagcccaaagtgttcgtctcccagaccctggggggtttggtgagctctaaaagtatagtagggggaggactccagtggagccagtttggccaggaaaggtcaatttggcctaggaaggttgtgcccaggtgctaggtgatgggataaccactgggaagtccaaggctagagtgaatacgaactgacaagcggggtagcttggtgtagtgttcaagagccggatctagttcccccaggagatcgactggccgatgctcccagtccaagtgtgggtggcactatctacttggatacctggcatggctgaatggaacctcgctctaagcccatggctagagcacctaaaggcggaaggcggggagagtaccaatgaggcccatatagggccacggtgttccgaaatgttgtcccaaagtcccagactgtggaaaggaagaggagtaaccctctagtgtggtgaccaaggacacagtcacatagtgaggaagtcctagaggatagtgggacttagtggtcaggcccgtgggctttgatccagtggcagtgttagcgaacacggccaaagacagaaagggacttggtgaggaccaaaatggagatattggggaaggctattccccatgtctgcaggcatcctaaagatgctaaggagtggatttgggatgaccactcatggatgaatggcctagttttggagagacgggattgcaatgcaagtggtgttaaaccactgatgtgaccaaggtgaatgaacgtggcttaacgtaacgggctcatatgtcagtggtaccttggggtgtcggttatgggatcagacacgcagagcacttggaccaagtgcaaaggttgagtggtatggatgccattctcggggctagcaagccttaagtcctgaatgggacttatggaggttgtgaatgagactcctccaagtggtcaaaggtgtggttaagtgactaaagtggaatggaaaaattagtcgcttacaattcctagcttgatctgctccgagatatttggctccacacgaagcaagagacttcggaaacgaatgccaaatcatcacaatcattagcatatctgaatgcatatttgaaaacgtctggaagaacactccaatctccacgagtggctatgcttaaaccattgtatcactacaatgccgtcccttggagatacgtgggaaactcacgcaaatgttgagcatcatcccaagaatgatatatggcaaccatcatgaagtgatcaaaccaatggcacacatcatccccaggatttccacgaaaaaactccggctgaacatgaggattggcaccaagagctagaggagctataccacatgccatcatcaactaagttttgttgttcaattgcaattgcatagcatcaagcaattgcactaattgctgctccagagttagactgctattcttccatgaaaatgaatgaaaaggaaaaagcaaaagaagggaaataaaaaaaaattaatcagaaaggacattgtagattctagaatcaagagtaagtgtcaatattttaattattaaaactgaaagattccttttctatttttttgcatgttgtattattcaagtgtttgatggtttatgttataatggtaaaacaattgattatgtgagggtgtatgactacgatgccgtatattaatattaacgtagtgggattttggtagtagtcaaattggtttcaatccggaccacttgctcctctatataaactaaggtttttgggctaattgatatgcacattttctatattccttttctatattccatgcacttatattagtaaaggtgagaagcatttttaattgtccttgaagagtgcttggatctaggattttagtttacatctagcttttgcattgtctaaatctaactttttccatttcctttattttgttatttctattcaagattttggtttaaatatagcttttgcatggtttagatctccctttccttctaactttttttcatttcatttcttttgctctttccttttcattcatcttcatggcagaccaacagtctccttataaacttctatatagtcataatccaatattatcaatagagttgggtttaccttcgggattaccacgagttactaatgctagtttgtgggattaatatttaatgagcattcttccacttatccaagtagagcctactgaacacttgggccacatacaaatgggataacaatggggctataactcccatcatcatccatttgtagagtataaagtagatgacttggtattagtttgttttccccatcttacaatacatggtttatctaaggggctccttgttaagtggaaattactatattgggtgttgtggcaagttggaccacaagtttataagattcgacatgatgtctagtagcctgatcctctagaaattgtgcacgtccaatcgttaaaatgtttcatacaaatggattaagacaactagtaccacctataaatccatcgatgcctcctgatgttcttctagatcccgacccatctatgagggaatcttgatcgtcttccattattccgagaggaggggatgatgcgaggttcatgtgtatggctacaatgccatatactaacatttgcgtagtgggattttagtagctgttgaattggtttcaatttggactatttgttcctgtatataagttagggtttttgggctaattgatatgcacattttctgtattccctttttccatattccatacacttacaattaaaatttttacaattttaagtataaaatattaattatattttaaaatgtgtatcaaaagttttaggtaaagctttagttgaaagtatagaatatcattccaacacttatatgtaaaataataaatgtaacagactcacattcttaaagaaaattgggtttaagagttaacttttgacattgctaataataaaagctataaaagaaaggatattgaggatgatactaatacaaataactgttttatagatgagtgatgagttatgtgtggtgatgtagttgccactaaagtatcatcaagtttatcattacatccaattagagttgttattagtaatatagtatggatttagtttatgttatattgtattttagctgtaacactaccaaaataaaattattaaacaataaaaaaaactttagtgactatcataaattacaaatgcaagaagaaatttaagaaaacttcaagataagccatattctcaactactgctcataaatttctcctccctacactttatgttcatctttgtttttgtcaggcatacaaaaaagtcaattttcattagagtaagactcacttattatattaatcattttcttaatttttattaattatattatctaaaacacatatacatagctaattaattaggattaattaaagaaatatccaagcttgattcccattatacagcaaataattattataaaataaggctttggcttttggctttggcttgtggctctgcttttgctacctacaacatcacactccttgctcgccaccacaatacgcattgggacggatcttggtgaaagctaggagactctaaggtcaggatctttgcgtgcggtggtggtgggctggctggcaattaatcctcttgatgtggtggtgtgtgtctttggtagaggactgcacacccattgttgtggtgcaacacatgtgcttgtgacgggtcctggccaatgcttcagcagaattgggagacttggatgagagccaagaacaagctccaagtatggtgtcttgctccacaattccactgtgtagctatagccgcttgcagttgcagtggcaatgcagctaaatccagacttggcaatcgatccccggaagaacagcctcgaatcaagacgagcgtgagagaacccccctgccacacacactcgcagtgccattagggtttatggcactgccatgtggcagacagggaaagcaaaagtacgttgtatgacaccgggacaagtgtcatgcaaggttttgccgcgaggcaatatttctagcgagcacactccatcaattgatcagccacatagctctctgtgcctatgaaattctctccatggggatccatcgcagtagcagtgtccttcgccgtgctcgtccagtgagatttaaggactttgtagattttagagtcaagagtaagtgccaatattttaactattaaaactgaaagtttccttttctttttttttgcatgtggtatgttttattattcaggtttctaatggtttatgttataatggtaacaaataataataattgattaaaaaatttacaattttatttataaaatattatctatattgtaaaatgtgcatcaaaagttttaggcaaacttttggttgaaagtatcaaatattggtatttgtgttattacgtcatactcagctcggtaaagttaatcaatcatcaacaagaccactgctcaccaactttgggatcgaacaagagtgcaacatacaaaattatgttagtctacaccacacaattctataactacataacatttcttcaagaaaacataacaaactaaaaacaacaacaacaaatccaacaaaatgaattcaataaaccaaatttaaaaaaataacaactctagcacaacataaaatgtacaagcacaaacctaacccgctcaagatacaagagcgagattgatgacaagaaaatttagaaaatagaagacagctttagcaacctttaacactagacaaacaatagaaaacttaagctcaagaagaaatccttgagacaatattcaacacatacaataaaaaaaaccaagcaacataagtcggtgaatcaagctacacaattataacaaaaataaaagacaactcaacaatagaagatttacaactagatgaaaatatactatcactaaagactctagaatacgaaggctataccactgataattatcaattgtatccaccatcaccaaaagaacaagttccaagcaacactaaagatatggcactcatcaacccaattatattgtcccctagcgctggaaggacttagcaactatggggacaaaggtgccgataagacctaaggacaacctctcaattcacacggctcctctccaacaggcaacaacctcatcctgaacatgcagcagagggactaggtcattcaagctctactagaagaacaaagtattgacactacacctcacggttcagcaaccccaaagggatccccatggctcactttgctagccccacgcctctttgtcggcaccagcaccagtccagctcctccgaccatcccaattgttgagcaatccccaagatagaacagtccgccaccaatggagcacctgctagcctcactgccgcagcttgtaaaaatgaaggaatcaggggtgttgtatctacattggatgtgtgtggatggcaacatgatcatctacctgattttcattggaagtaaaattgaagatgaagaaagacatctcaaacaattcaacctcatcatcaaagttaatcaaaaataagaaaataaagcacttctctttctttttacactcaaaaacaaaacacttgaatggtactacaactttgaagagaaactcgactacaaagaaaagatcaaaagattcaaatataaatattaacatggtggcacaacagtcaaacacctagaacacctcaaaagtatcaaacaaggcagtaaagaagacattgaagactatacctaaagattcaaatatcacttaaagcgttgcaaagatttactcactaaacaaggtaagtacatcttgtatgtatagaaattgaagaaaatctaccagaaaatagttgctctagcaagtttggaagaagatccaaatactgtgaacaccatctctgagaaaatcaaaagcctcgaataaccaacaacgaagaccacctcttcgacaaaataattattagcaatcataccaaaacaatccacaatagagaccacctcctcactaactaaattaccaccagcaaaatcaacaatatgattcactacctcgagcattccctcacaacaactatcaataacaacctcaaacttaagaattttgacctcagtattagcaacaacaaaatcaaggaaatcaacctgctcagcaaaatcaacaaaatcaaagacttcctccaacagtaaaaaatgtcaatatcgaaccaatccaagataaatattatgaaaatgaacttgagatatgagtctaactcgaagtcaaaaagaatacgacaatcttgaagacgatcttaatgaataaattgaagaacaacatctccaaaacgaagtacaagaaatctcaagacacaaatggcaataaagcaaaaagctaatcaacacaatccaacaaaactttcaacaacaacaacctgaaattaaagacaatcaggaaattgtgacatagattctatcaaaaaaagaggaacaactaaagttcatcaccaacattcttcgataaggtatcacactcaccctctaaaaacttttacaagttgctccctacttgagaaaacaacttctcaagatatatcaagcattgccaccagcaaattcaggtcaagtcatgaaaaagactaacacctctttgtcccacaataccaacattcaacctggcgacttcgatgaagatgtattatgcatcccaatcacgataagaaagaacaaagtttcacaagcaattattaatggcggcacaagtgtcaacatcatcgagtatttaacctgcaaaacaataggacttgggccaatccattttgcacccttcaacgtcaagatggctgacaatcaaagtgtacaaccattaggaatcgtgtgaaacattcctatcaagagcaaggatcaagaatttaaggtaactttcatcgtgctcaaaatggcaaaaaactagagttcctatgaagtactcttcagatgaacttggctcagatagttgacatcgtcacatactggcaaaaaaacacaattacctttgaagagcatcaaaaagcccctcaaatctccataactacagcaaagaagattgcaaagaaagtttgaccaaccattagcaaatagtatggctgtaatgaaggtctccacaactacaaaaaagcacaaatcttgaagggttaaagcctctcattgaagttgatctcaaccgagtaatcctgacaattactacacaagaacaatacacactacacaacaaatcctgaaactcaagaaaacaaccttaaaggtaaattcccaagtcacgaaacctcaacacccatcaacataccaactgaaatcaagaagtaacaagattgaccaagaatcaaacatgaacaacttcaaccaattcatctacaaatccatcttaaaaaagacccagcactttgacaataaggaacttaactcacatcaacactcaaccttgaagagccaattgaagaaatcgacttagaaactaaagatgaactaaagaagttctacattgccaaagaccttgaccctgacttcatgacaaaagcaatcaatcttcttgataggtacaaatatgtttttgcttggttatatacaaacttgtgaggaattcctcttgagatatatatgcactgaatcgagcttctacctcaagctatattaagaaagcaaataacctatcgaatgaaccccaacatgcaagtgatagttaaagaagaacttgacaagctcgagaatgctggcttcgtctacccaatttgaaacccaaaatggctatcaccatttgtcatcgtccctaagaaaagtggcaaactcaaagtctatataaattacgaaaagctcaatgatgcaacctgaaaagacactttcccaattccattctctgataaaattcttgacacaatagttggacatgaaatgtactcacttctcgatggctttagcagctacaatcaagttcatatcacacctaaagatcagcacaagacagccttcatcaatccttggggtgcttatgcatatctatgaatgccttttggtctttctaacacattatttattttccaaagaatcatcactaacacatttcaaaattaactcactgacttcatatgagtttttatggatgacttcagtgtcttcagtagcaaagaacaacatctccaacatcttgataaatgcttcatcagatgtcaagagaacaacattgccttaaactccgagaaatctaatttcttcatcaaatccaacatcttacttggacacattgtctgtaaagaaggcatcctcatcgtcaaagctaaaacacttgcaatcatcaacatgtaacatttaataaacatcactggactatgatccttcctcagcaaaatgggataccattggcgcttcattaaagattacgcaaaaattgcaaaacccctcacagagtttttaaagaaaaatcacgtttacaactggactcaagactattaacaagcattcaacattctcaagaatttgttaacaaaagcttcaatactcacccaaccaaactagggcaaagacttcaacaccaagtcgataccttcaattacgccataggagcaatactttctcaacaacaaccgagaccgaccaatctatttatgcttgtcaaagactcaactcagctgagatgaattacaccattgaaaaagaagctttagaaatggtctatgcactacaaaagtttcgacactacctattcgacatcaaagttaagatcatggtcgaccacaaagcacttctaccctctttaacaagaccatcctcaccagtaaaattgcctaatggttcttattacttcagaaatacaacttcaagattattcacaaacttggcaaataatataaccaagctgaccacctcaaccacattataactagcgaacaactgaaatacaatattgacaactttcttgactccaacatactttgcatccacatatcaccaacatggatggacaatatctactactacctcacaacagcaacaataccaagtcgatattccatctttgatcatcgtcaacaatttgttttgaggaaaagacaatattcagtcataggagaaaaactgtacaagaaaggatgagacaacgtactatgaagatgtgtacaacctaaagaaacttaaaatctactcaaagaagcctattgtggacaaacaggaggccactttgcaaaagaaatcatagtttgcaaaattttgcaagtaaaactctaatggccagtactttggcacaacttaaatttttttgtcaagaatgcaacatttgttaaaaaaccaagtacacaccaaaagcttcatctaaacaacaccactggaaccatttcaatgatggtgactcaactttgttggaccactcataataagctttaagtgaaacaaacacatcctcatagcaattgactacataacaaaatgggccaaagctcaactaatgaagaatacaacaaaattcatctacgaaaatattatcacaagatacaccctaccttgagaactcatcacaaatcgaggaatacacatcatcaacgaaaccatcaagattctaacttaaaaattcacaatcaagcacaaggcttcaacaccatactaccctcaaggcaatagttaagcaaagtctacaaacaacacactcaagaacatttttaagaaaattgtgaagacaagttagaaagattaaaacgatcacatccacaatgtcttatgggcatatcaaacaacatataaggtttcaacaaatttgacaccctatggcttagaaaccctaacaccacttgagtacatcattccttcattgcaaatagtaatatattacgagatcaaccaagaagaatcaaccaagagacgactagtaacgctaaaaaaacttgacaaagaaaggctacaaacaatttggacactcgaagctattcaagctcaaagaaatgttaaccacaacagaaagagaagattaaagaaaaatgaagaattcaagatcaataatcaagtactttggtttgaagaaatattaagaaaatcagctccaaagtgaagtcaagatgggaaggaccattcctcatccaaaaattcagagctccagaaataacagcaattgcaacacttgatggtgagcatttccaaaccatcaacctcaacaagcacaagaaataccaatcatacaactcaaacacatcaacaacaactttaaaaaaaatgaaggtctcaacattgaaaatcaagaataaaacattaagaagaattacaagcatgaagatcaagagatcaagactatgaagatttgatctcaagaatttaacacattcaaagtttacaaagttcaagctgaaaaactcaacacaatttagaaatacgaagctccaattcaaaaatccaacacaagaaagtctttgaagaatcaaactcaataaaacaacatgaagaaaacaacttgaagaactttgacaaaaaacaagacttagaaatagacaaatctctcaagactcatcaacaaatatgccaaaaaccaacacgaagcaagcttctccaaagctaccacaccaacaaagagaaaactcaaaaaagttactataaggacttaaacttgacactctatggcaaagggcaaaatcttaactctagagatacatccttccaaaggacagtatgtgcagagacacaatacatcaacgattagtttgctgaagaaaacatggagctccacaatgagatccacattttgaaggcgaagcagcccgcaataatggaagatgataatgaaagcaagcataacaaggagaatgacaatgatgaagagttccactagcgactcaacaaattcaaggtcgaatttgtaggaaattcagtgccaacaaagccaactgacacgatggagcagtaggagctttgagatgaagttctatttagtcatgaaagagtgaatagccatgcatttgaacattttattgacagtcaggattatgatcttgacactcaaggttatgatcttgatagtcatgactcaagaagaagtggcagttgccaccatataggagtagttaaaaaggggagagttagtatttaatctttatccctatctctattgtagtctagcctcacatccatttattcaagacttagagtattttagtgatattaagcctatccttattcacgaccacttgcataagccttcttggggattaaaagtttcaaattaatctctaatcaactcatgtgttcagtagtttgttccaatgtgagaattactgtaccaatgcaagatcaataacatcaaaagccctctatcattttgcaactactacagcaaaccagcatagttagttgcaatcgcaagcctaattacacaagaattcttctggttttcaggcagtgagcatggatccagcgtgagagaatcccgctgccgcgtgtgcttgcagtggcattagggtttatggcactgccacgtggtggacagggaagcaaaaatacgttgtccacgtcatatgatgcctggacaggtgtcacgcaaggttttgctgaggcaaaatatttctagcgagcccactccatcgatcgatcggtcgcatagctctccacgcctatgaaattctctctatggggatccattgcagtagcagtgtacttcgttgtgctcgtcctggcggcattgttgttcctttcgagcaccagtggcgatcttctcttcaggcacttgtccatgccccgggctgccaatgcggcattcttgacagcgtggctcagccggggcgattgcgatggcaatggcgaaggtggcaatcatggggtagggggcaccggcagtggcgctaatcccgatgataatcctcctcctcctcttggtaattgtggagctcgagcactgaaatattttggatcaccattgccatctcactccttgttgaaattcattccttcttgttgtttgtgagtgcatggttttttcttcttttttcccttttctcctcctcaagtagtagcattatgtgctgtgtgaaagtgactccaagaggaattaagaatcccagggcattgtagccatgtgctttgctgctgggttacatgacacactgccttacattgataatccccacttataagtagagactctctcttcaacatgatttcacagtgaccctctcaagggatcagcttctcctatgatctgtggtgcgcatgtgcaaattcaaaagcttttatacaagcatacatacatgatgagtggacagacagaagtccgaggtatttttcccatgctttcaagtttataatagcacttcgtttcattcttttaggccaggagatgacatggatgatacctcaagagacacagatgttgctccacagcatagggaggtaatcttttcagtgaaaaatccacaacattctctttttcttttggttgtttttggttttctccagagacgagagtcagtcgcaagggtgctcatgccacctccttgagccatgaacatggtcttaagaaacgtttcggtcaccaggaacaactgcaacgcaagctattcttctagcaccagtgaagatgcaatgctgcaattcttcgttgggcatcagctctgaggtgatcaaggtcactgatcacgaggcatttgtcgaatttgtgagtgcgggtgagagctcgtcatccttctcagatcactccaatgacagctataatgacacagttgatgagcgaaggaagaagaaactaaagcttcccctatgaaaattgtttttcgacacactatatgaatctaatgagtcttgtaatgattttagtaaatttataatattatttctgatggatacaaaatagctggtaattgttttatttggacatttctgtgtactttccatgaagctagctattgttctaatagtgattctcagattagcagatctgactgttcaagcagatgtaaattgggatgctcttacactttatggttttattactagaagtgatgttaatgaaattggaaagcttttagtggatatgatggatactaaaattgaagaaacttataaatactataatgcattacttggactgaaactctttctttatcaaataaagttattgaaattaccatatggatatacagtaaaaatcctaatgggatgtgtagtatggcatggagacgaacagggacaggggcatcaggagaagaaattagtggaaaacttaatcagctttgtttgatatcttagaagaagctagagtgggaaattatggtcttatagctgctactttggattatgttggtataaaataaaaactactaaatgctagaagatataactctatgagtattgctatgaattataataaacttatatttatacagctgttaataattgttggatttacctacacttatgagtggtgaaaaatttgagataggatcctatttactcaagttgaattcactagtttctccaaatggatattatgaattaactcttcagagaaattgcaatttagtgttaacatggaagagaatgcatgttttatgggaaagtccgaccactaacaaggacattgattgttggttacttttagagacaaaaaaattagtaataaaaaatactatctatggacgatggtggatttgtatatataattggttcaaatgataataaagtattaaagccttttccataataaaatatcaatttatatatatacacatatatatatatatatacgtatagtataagctcttattttattatctattgatccgacggctgtcgttggttgaacggtgacgattgtttcaaaagaggtttttgtagggttaagttcaagctatggacgcctcttcatctagaaagcatgcggatgaagagggagagctggaggagaaaaagcgacttaaaagaggtgagattgctcatgtgaactttcgtctggactcggcacttgcggaaattgcagaccttgaatgcaaattgtgggaagccggggaggatgccgaactaaaggagcagatagcctcagagaaagtgcgggcgagtcaactccaggaggataagtcgaaactggaacgcgagctctctgaaatcctccagccgccacctgaatactggaaaagagtggagggtattgccgaatcagcatttgcgcaggagtaccaaagagttgggggattagacaacgtggagtcgttgcgtgagaagctggaagaaacaggagaggagtggaagacgaagaaagccatgatagcacctgttgtcacgttagttcagtcgagtggctggggaaagtcgaggactacctgcgagcttgcgaatttaggtgtgttcgtcgtctactgctcattcgcttcatctggcaccgcgtaccctccaaggtctgcctttgcggacttcttctacacaaacgccgtcaaattgctcagctcgggttctacgcttttgtcgcagagcaggttcatgctcttctgcattgactattttgtgtcatgcatccaggctcttctgcatctgacttccggggaggaccccatggatgccaagaagttcttgaacgatctcatggttgggaagaacttttgggacgtggtacaggcgaagatggagataggaaatgaagcccgggaggagtttgctaatcaccttgacgtcgacatgaaagagaagcctggcgagaaaaccaatatgtggggcatctgggaaagtaaagtgtttaagaagtacaacacgcttgaaggtctactgtcgaatgttccagctcctgccaaaggaaaactgaaggtcctgtttgtcatggacgaagcccgatggtttacttggcatgctgatccgacaactgttgctgcatttgttcctgcaaggagggcttccagggtgttgcctgaaaatggaagtgtgtcggtgatgttcaccgacacaaacgggaggctaaacaattttgcgccgcccaataataaggcatccggtttagggtttagtagcgatcgagtggctgcggcgggaaagctagttgcacatccagcgtactgctttttcttggcagacttgccatcggacgaacaaacaggtggccttctgcttgctcaagttgaagatctgggtcgtctttgcggctatggtcggccactgtggcaagcattggcgaaggcttccgcaagtgcaggtgacgtgctgcttttggctgtagataagctcctgggtggcactggttcgttcaacaagtgtatgcttgaaagcggaggtctatcacatgaggcttgtctggctacactgggctgcagagtatgcatcgacatcaatccgcatgccacaattatcactgatatggttgcaagtcacctacttagcgtgatgtccatttctgatgaccggactcttgtttggacgcattgggctacggagccactggttgcagcggctgcagcacgggttttgcgtgcacaagggaaggttgggacaggctggaaggagtgcttggaggcacttgtaactgggatgaagcgtggatgggttgatcgaggttacaggggcgagttggttgcacgggtgctgctacttcttgcagtggacagtctagacagagattcatggaagtgctttacttttgacgagctttgccgtggcttaagtgggaagtcgctgtccgatcttattagagaagatgagcagaattcagcatctccgacccccaaagctccaggtggtggagaagaagcacaggtcgaagtaaacatgccgccacctccggcctcggctttgaagcgtagcacaaggaaaagcagggttaaagtaaacaaaaaacttctgggtcagccgcaggtggcttcagcgtccctgtccaaagctccaggagaaaaagcacaggtcaaagtaaacacgccgccacctgaggtgaagtcgccatctccaatgctgacggcctcgaaagctccaggtggaagtacgcacaatgctgaaggtgagggggaaacaaaacaagcaggtggctctatagatggaagtggtaaagaagaaatccacagaaacatgggtgaagccaagtttttttgcttgctattcaggaaaaccgacttccgactgcaggagctcaccgccaaagatttgcttgaatttggaaaggctggcgtaggaatcatttgccgtgaaaatgaatggggcatagacatcgtcatcgttgggttctttggtggcacgtttagcctggagacgatgacactcattttggtgcaggtgaaacacacagagaaacatgatgttgatttagcatgtgctaaatgctctccggagttttctcagatgttcagtagcagtgcagggcctcaaggttggactgggttgaaggtgccatacgccagtctggttttgaatgtggcccatgtgccttccagcagtgttcgttacagaactaggaaacttgtcatagaagcattgctgaagaagacgcctgcaaatcattccatggcaatggctctccatgatgtaagcaaccaaagggaacgactcgagagacgatccatggggttcaaatatagagggaaagggcccatgaacaagagtgcacccccttttccaatcggttaagggtcttgggatagttggagttaagtactgggctgggtgacctcccgggaagtccaaactcaggagcttacatttggtatcaaaggggtcttgggtccgactctgttggttggctaggggaatcacaccacatgttgattgacatctggctggtccagtttgctcccgctgggctcgaccagaggggtagggtgtcaagagagcgaggctctcgggagagctgcggctctcagcttccgttcacgagggcgtgaacttgcagggaagcgtggtggattgtaagcaaccaaaggaaatgactcgagagacgatccatggggttcaaatatagagggaaagggcccatgaacaagagtgcacccccttttccaatcggttaagggtcttgggatagttggagttaagcgtccttgggcttgaatagtactgggctgggtgacctcccgggaagtccaaactcaggagcttacacatgacactcatccggaatgcaaaggccttcaggaatggacaaaaggctatgatggggatagattacgcatggtattcaagtcatgggaacggtattttgcttcagatgatcatctccaacacattgtggtcattgaaggtacgtttgtgctgtttcattttcaatcacttgatgttatcttttgcactccaggtttggatgcattctcatccaaggacaaagtgaaagacctgatcgacatctctctggattctactgcagacatgaggaaactagaacaagttcagaagacgtatgcacatagaatgttcggatgggttaagaacacggcaatgcgcaagtgtttggagccaaagctcagtgtgaaaaagagtaagtaaaactgagaatttttttgagaaataatctgaatttttttctccattgtagaggtgcagatgaaattaccttagggggtgagatttaaggagtttgtagattctagaatcaagagcaagtgccaatattttaattattaaaactgaaagattccttttttatttttttcatgttgtattattcaggtttctgactggtttatgttataatggtaaaaaataaataaataatgataattgattatgtgaggtttaagtgtacaactacaatgccatatattaatattagcatagtgggattttggtaactatcaaattgatttcaatctggaccattcactcttatatataaattagaatttttaagttaattaatttgcacagtttttatattccctttccatatttcatgcacttacatggaggtgaagggcatctgtgattatccttgaagagtgcttagatttgggattttggtttatatttaacttttgcattgtttagatttaactttttccatttcctttcttttattatttccttttgggattttggtttagatttaactttttccatttcccttcttttgtttttttcttttcgggagcattgtttagatcttcctttccttctagcttttttttcatttcatttcttttgctctttcctttttattcatttttatggttcttcctcttttgactttggagcagcagttggtacaattatttaatgttatgcgattgtagttgaacaattaaactcaattgatggtggcattcatagcacgtggtacaactcctcttgctcttggtgccaatcctcacgtttggccggagttctttcataagaatcctagggatgatgtgtaccattggttcgattactttatgatgattactacatattattcttgggataatacttgatatttgcatgagtttcccacgtgtctccaagggacggtgctgtagtggtataatggtttgagcacaaccactcgtggggattagagtattctctcggacgtgttcaaatgcacatttggacatgctaatgattgtgatgatgccttccaacaattgcattgttttcatcaaaaactatctgaatcagtgatgcaatttggcattcgtttccaaagcttcttacttcatgtagagccaaatatatcaaagtaaatcaagctaaaaatgttataactagcacttcgtcaaaatcttatagaacttatggatacacttgctctagccacccttgataatgtctttcatttggcacaacattatgagatgttgcctcttcctctcactatacgtcctttagctctacttcctatggaagatggtcatgttccaatggaggttgatgttactgctgctcaagttcaaggagaagggtgaagatttagtcatggccgtgatgtttactgttgggcatgtaatgaagttagtcacatttatcaatgttgtcagagttttccaatttgcaacctccatttcatgggtgaaaactttggcatcaacaatgttttattagtgttgttgctatggaaggtctggacactgagatacattcaggaaacgaggagttacacgagtaatagaggaaccttacacaaataagttagtattttctaataaaattaaattattatttctatagattcttatagggtttatgagcaaagaccatccatccaagatgctgctatcgccatccaggccacttcctccagagcgtccacctcggtaatctcctcatccagatgtacaggaaatgtggtggcaccagcagcctcgcggccgcgcgcgcagtcttcgatcagatgcccaagaaag

SEQ ID NO: 14854 - DNA, 1767 bp, Physcomitrella patens
  Intron number 1 from transcript Pp1s51_14V6.1 (locus Pp1s5 1_14V6) derived from phytozome v7.0 (chr-ID scaffold_51; p os 193863 to 195629 reverse strand)
aggcgctcatcatcagcgaccccgatactgacaaggtccgccgaatggaaattggggtccgtacggaagtggaatttgagttgcgggtcttgatggtgtgatttctttatggagtggtgtgcgagagtttcactagtgttatttttattttttattttttaagatctggggtgcgggggttgtgcgctgtagtttcctggagaagaagtagtgtaaaacgttgtattcgcaggtgcaatgcgtctgccattgaagtctcaggagaccagttttgtgggtgtcgcgtgatcaggcatgttgtgagtgtggtcttgtggctagtcagtttctctgtttagttcgagggattttccctattgttaaattatactcgaattgactttacacaaattccccgaatttaagaggtagaggtttgcatctgatggtagctgccttcctgattgtagattttggaggtcttctggccttaacgtgggaaaagcacctgatcctacacttcatcaatatcctttatggttttcatggattgtgggcgatgattatagttttgagcatagtcgtatcattgggatttcggtatcaggtggcaaaacaattctggtcgtcgttttggtttagcagccacggaattccttgtggaagaattatgaattttaatttttggcttttgcagtgcgggtcagcgcgtgggcgtggaacgcattacattacagtgtagtttgaaacgtctttaatgttgttgctctgatttattatatttgggaaatgctcctggggtcattttttaaccgtcgtgtcaacagtcttttagttacgaacttcttcgttggggatttcgaggtaattagctcgctttcaaagtagggccgaggttgttgagcactcatgcgcttgcagtgctgctcatgttaaaccatatttccctcatctgatgctttttacaacagaacggctgattatcagttgaaaaagaattttctgtcgaattcaattgcttgagtgtcgttggattgagagcgcaagcattgtggcatcgcctgtgtatatatatatatatatatatatatatatatttctatacatgtatgtttttttaacaacaatatttaagcattagtttggacaccagttacgaacctcgcaatttcgagtttggcgctggtgtcttcagggttttgtagttgtgtgaggtgtaggccggattattatttttccaagcattaatctgaatgctgaatcttggtctcaggttgtcttcctacattgtccctgttgatttgattcctcagaaatatctgaaaatatcaaacaaactttcttatcatgacatatccagaattctctgtcatttgccagtctttcaatttttttcctcacaccatataaattgcaaaactggaaagtacctattggattagcgagtcttcttcggggctggtggttattgctcaatcgttggttgactatatttaaagccgtggatgcacaccaacttggtagctgttggtattatcttgaagttttcgcaacgaaatatattagttatctgcatacttctatcctgagactgctttgaaagtggctgatacagtaaattgtggtgcactagttagttctgccttgcatgttgagaatgcttgtgcccctggcatgctattcagattgtaagtgctcctctatgggtaatctcaatatgtgcttatttttcaatttcttattgcatatggcaagattggattgtgatgtttgcaggctgcagcttcg

SEQ ID NO: 14855 - DNA, 1723 bp, Physcomitrella patens
  Intron number 3 from transcript Pp1s127_27V6.1 (locus Pp1s 127_27V6) derived from phytozome v7.0 (chr-ID scaffold_127 ; pos 130885 to 132607)
caagggctaggtgagtattctcgccttcatgttcaaaagttggcgttatctttttcaacagttacaattgtgcaggttatattccatctacaagagttccaattcctcgttcacaaagcttagaaatatggtgcttttcatcaatgtatgttttgggattgtaactctactcataatcgacgttagtaattagatcagttcgtttttttcttcgcctagtataagtgtgcatggcagtatccattaaagaatgctggtttcactctctgactttggattcttcctacacactagcatgtgcgtctgggaatacacatcccagtaagtgattgtgtaacttgtacatatatctatttttattaatacgattttattactatttggatcatgctctaagctgtgaaaatggtagtgtttttgttaggaagaaattaagttgatccttctatccagggaatttgatggatgtggaacaggatgaacttatgatgctcgtaccgcccctcttttctatcaaggacatgcctgaggagactgtgtacataattcttacctttcctatccaatcaaaaaaattgcatgaacaataattcttcggtcggtttcatcttcctctgcgaggttctatgcatttgcatcggaagaaatttacatcttgtttgctgtaatgactctgagttgcagaaatgtagagaacgttgattgtattgtccaagttttcactaaacttgaggttcgtgtttctgctacctttgaagaatgcgcccgtcagatttcgtcagcaaaaagttgaaaaggaagaacaaaactgatacagcacacatggaggtatgtgattagtttgatagtctcgcttagatctggaccaaccaagtacttgtcctgatctacatttgcagaatacgtagtgaaagttacagccactcctatgttttactctttgcgattttagacttctaagccgctgagctcttttttgctggtatcaacagttaatattgcaaattaacagaatgttatcccttttgaatcaaacaaactcagaatcttcttcatctagctaagaatacttacagaaattaggcttgaaagtaagaaaagagtatgctcaacacatcctcaaatgattctcaactgtctcatttccgcaagaaacactaaaacaatttggaaatgataagattttctgataaactaatttgttgttgcgacacctgcatgcaggcaaattcaatgccttgctttgctgtggacttcaagatcccagatatcctcacagacgagactacattatttctgacagactgtctcaagtaccacttgagcagtccaatcttgctctttttgctgacttctgtgtgatggttgttgctgcgttgagaacatgatgtcatacattattgcactattgttgggtcttactgatttgtggcttcattgtgtatcgattccttctgatgtaaggttcttgtgtttttacaagtttagacgaagtgatgaagacgataccttgtgctgtgggtgttgcttgtaaggatactgattttgtagtttaacctgtatatgcggttgcggagctcatattttgattgcgtgcatattagaagcgcctgttctttcgagggttgaagaatttagcaatgaataggtgtgatgatcctaaatcgaatcgtattcaccttaactctgtcaatacaagttccagcaataacaaggtgggagg

SEQ ID NO: 14856 - DNA, 957 bp, Physcomitrella patens
  Intron number 13 from transcript Pp1s182_90V6.1 (locus Pp1 s182_90V6) derived from phytozome v7.0 (chr-ID scaffold_18 2; pos 800251 to 801207 reverse strand)
gctctccggtggcatctacggatcccaagcggacggtatctaaccaccatccgccgcttagtatgagggattatgaagccgccctgtacggaattgagtctctttctgttgaaatggatcgaaagcgagtaaagtaggccccaggtttgtggctcaagggcatggctgatagcttgtctcttcaatccaaaccaccctattgttgtgaagtcgagagttgattttcctggaagtagcctcaattgtggacgaatacgaaattacgctctttggtgtctgttcggaggcatttcattcttggatgaaatgacttttaccttttatttgctttttgagagatctgatctgtcaacacgatgctaatcgtcattacgtcgtgcagaagttatctgtatgttcttcaagccatctgttagtcttattctgaaagaaccgtctttttcgattgaaactacaaaataaatgtaaaagggtagttgttactgacttaacatagtgtcgatagtcacctacttgtagccaaccttcatgttgtattatgatctgaaagtcagtaattttggtcagctgtttcacttcccgctttgtcttgcgctcctttccgcggatgtgaccttcatagtgctatttaatattgttttggttcgatttctgtagttgggtgtggggttctgaatgtaggatgtgaatcacttatcatctagcttccgagcttcagatctgtggaattcagaatacattacactagaatatcctcagacataatattctattaagttcaagcatgatgtgatatcgtggtttcgagtagcattgtcatttacagtgtctttagttaaacatttagatagctttgtgatgattagtaagtaccagtatcagctggactggatactcggacatctgggcatggcttacgtctgggcagcctggtggttgtgcagggacgagattctt

SEQ ID NO: 14857 - DNA, 362 bp, Physcomitrella patens
  Intron number 3 from transcript Pp1s59_30V6.1 (locus Pp1s5 9_30V6) derived from phytozome v7.0 (chr-ID scaffold_59; p os 115489 to 115850 reverse strand)
atcgtgctttgaaggaacccagtaagaatatcgatgtaagtcttccgacgcaacgtgattgatgggtgacgactgctgggtaagcaagtttgggacaacagcaagctctaattgtatctatatatccacaattttatggttgagttctaattcggaagaatagagagcaatgaatttaagctggttctcataggtccagtgacattcaaggaaagtcattaaggttggtaaccatcgtacaagagcctatccccacttcgaattgatgatagtaatcaacgaattatttgtaagatttgggtagtttgcagctgcatcaaccttcatatatttgtacattatgtacagggtcgaatcacagt

SEQ ID NO: 14858 - DNA, 1321 bp, Physcomitrella patens
  Intron number 2 from transcript Pp1s44_257V6.1 (locus Pp1s 44_257V6) derived from phytozome v7.0 (chr-ID scaffold_44; pos 1655056 to 1656376)
ctgatcctttcaagagctgggacccccaggacaaggtaggcatcaaatttcatgccctaactctactcccgactgctcataagtcaccgctgggtagctctgagtgttatttgttcccttttcacatggcggaaccaatgcgctagacgaaaatgaagcagcttaggtcagagctaattcaaacctcaccaggttcaaatcgatatattctatgacattgaactctcgcaaatattttggtagccgatcaggtgaattgtagaccttatgtctttttcgtccacgtttttgagctattggtgttttcgcttgtgtttttaaggaggagccaagttctctgatcgaaaatgggtgcgtttgagatttcagtgttagagtagctcgtgatgtctttcttgtgatttggcatctttcatacccaccttgcattttctgccagatcaagttgtgttgaaagcttacccacattttgctgcagttttgaagttaatttagctcaggtgcagtgatgacatcattcagttttcaaagccaggagattatcttcttattgttggtactgcatttgacatgggcatgtgaggctgaactgcgaaacattgcgtaggcaggattaacgtattgagactagatttttgtagctatctgtggctagaacttgagagccatttaggtttttattcctggttgcgttgacgctcgaaaaggcgttgcacaggcatgtcagagatctcaaactgtgtcaagccgttcctccttgtcgttaatgttgaagggtatcttggtaatggaacagttccagagatcagagagacagtgaaaagttttgctgtgattcttgccaacttcatggtctttaaggggctatttgagggaatgcggaggatgggataagggcccgacgaagtgtagtcagtgaagctcaatcgtaataattgggtgactcgtgttggcacttgagctgatacgtgatgtttcagttttgaggttgcgttatcagtcatattcccatcttcaggcagtaagctgtatctcttgtgggggaaaacttttgctgattaggttgtaacaatgcattaccccgcagagacatgatttgagggatacttcataatatggatgcagtaatacatgaggattgcaccttatcaaatttgccatgtttgtgctttgggcggatccgcgcccaaggatgttaatgcttgcaattctatctccttaccgaaagtttgaaatgttcttttaggcactagttatcagaatatgcttcacattagcctctgaaaaattttctcgtttttacagcggtgggcttttccca

SEQ ID NO: 14859 - DNA, 1558 bp, Physcomitrella patens
  Intron number 1 from transcript Pp1s96_108V6.1 (locus Pp1s 96_108V6) derived from phytozome v7.0 (chr-ID scaffold_96; pos 688115 to 689672)
tttctctttcttcttctctcgcgtcgtttcttcacgttagttttctgaatcctccaaattttatttctttttgatgcttgctgtgttaggactgcagctaggcttgattattttgtagcgagttttggttgctgctggcggttgtagtgatagtttcgaggaggaagtggatcaagtgcgtgctttgtgtggtttaaggtagctacatgaatttcgaccgctggtatttccggcttcttgtgccctaagtttgatttccactcccggaaccttttttttttttttttttttttttttttttccttcccccatcttctcctttatttctttattcatatcgacattgtcagaaggtggtaactggtgatcgttgaaatttttggtgtttgacagtttaccgagtttaccttgcacatcgagtggaatttagctcggattacacgattgtagattatgcagtttctctgtgtatgacgtggtggggaaggggctaagagagagagagagagagagagagagagagagagagagatagagctttctttgataagccgattcgcaatgtcctgttctcaccgagcatccattgtttcgaggaattgcagtcggcttatcgaagcacaaagtgtttccgatctgcctgtacgaattaaattatgccgacaggtgtaattctcatgccttaaattcacgccgttcttaccgcactcctcctgtatctgtacactacggcgagtttacaatgtgttagtgtaaacgggtctcttctgactatttagacgaggttgggcataagttggaggtttatggcaatgatactctaatctcgaattcgtgtgaaagtattttttgtccttagatcgcggaagctgatatttttggtactttagcgaaaatcgaggtaaagaatgcagtctggatgtgatcatatcttgacattaaattaacttcggtgcggaactgctacctaagaagtccttgaaacatgagcaggatatgtccattcaacgcaaccatgtcgacgaggaattccattgaatattaagtgcaacgtcttagagatcagtccttcaaaattcctcacttccttagattctgtgaatttctttcatttttctcgttgaattaatgcaagctatataattgtcgtgggcctcatagtctctctttcaaatcctaaccaaaacaacgcacagccctatataaatgctcttggaatcttcactcaagcgttctgcactcggctaaacaataccttccccaaccattcaataactcagttgggcatgtccagccgtagccgtaaagaagacatgccaagaatgactgttttctatcaatatacccataccgaaatttaccggcttataggtctctactgaaaaaccatcaaaacgtcctcccatgaagtggttcagctaaacctacaaaatgaagttcgttcccaacgcaacacaatagtcacccgcaacacagtagagtcacaaagcaacgagctcagcagttaacctaacgtcctccttacatgataatatgtgcagcggttcgaggtgctcgg

SEQ ID NO: 14860 - DNA, 1388 bp, Physcomitrella patens
  Intron number 2 from transcript Pp1s452_30V6.1 (locus Pp1s 452_30V6) derived from phytozome v7.0 (chr-ID scaffold_452 ; pos 193574 to 194961)
aatccaaccagtagagttcttgcgctgaaaggtgcgttctcagtctcatgcacgaggttaagatcagagaatatggtgctttacagagatgcgatagatttgtcgtgcttcactgcaacaggaattcaaggacacattctgccctgacgattcctagtatgtgtgccttgctgagtcagttgacctcacccccgaggttttcagggctttgttcagttccaaaattagcttctagagagcaatgttcaagtaattcaattatgtagaaatcaaaaaactatggagtatcgcaagcagaagactgattcgaccgagagtaggcctctaatttcttatcacattcactttaaagaagaaattatatggggagaaactgacagcttcaacgcggaaccgcgttgtacaatcctcaagtctactgagtgtttggaaggattgtatattgtagctggaggggcatgaaaatgtaagagttaagtaggtgcacgattctacttcacgtttctacattaaattctttgaaactgttgctgtgtaacagcaagtgatcaagttacagggttttagatgtacgccttcaagagattatcttctgcttttaaaaattaacattcacctatgcctttactttcttcatcgcgtctatcgaggaaagaataccagagaagtatcgtgtgatcaggcaccgattaagcagttgaacatttgtatacatgatcgtgcgtactctttatggatttctaggtggaactatggtttgtatagggatatgctgccatacttaggtatttcagtgtcaatatgaacatgatgcactgataaataaagccgttaagaagtagtcttttgacaagcctttcctttgcaacttcggaaattgaagaatcttgccagttgtacacgtctctagcaaggatttctgcacctctattttagtgctagatattcttgtgtcattttgatctgcgaaaagagcttgaatgcttttggtacctaaagcgtcattgtgtatacacaatcttaggtaccaaccgtgaacatgcaaagtgatcagctgcttagtttcaagctataaacaattactatttcacatttgacctgtagttctgatgatttgggctttgttctgaaatcctgagctaattttatatggccgtcgaagacctccttttaggggccacatggactcgaggacctgagttattgatcctgcatttgtagattgtctgtagcgtagttgtaaatcattgagctatagattatctttttggtttttgatgtctaagatgtacttgctagaacgtcaactttatgaagtactgatcttggctatgttggtgctctaatcaacagctctaattcctgggtcaacgcaagatcacttgcaa

SEQ ID NO: 14861 - DNA, 1019 bp, Physcomitrella patens
  Intron number 1 from transcript Pp1s41_175V6.1 (locus Pp1s 41_175V6) derived from phytozome v7.0 (chr-ID scaffold_41; pos 1408922 to 1409940 reverse strand)
ccgaggttcttcactatctatctctccctccgctgcgcttaaaatggcgaagagtgtcagattttggaagaagaaaaaaaaaaaaaaaaaaaaaaaaaaaaaactacttggtgcagctttagtggaaggtccatgcgcactggttttaaaacacgaaaattgataaatagctgcaagtgtcaatctgcaggcgtggcgtcggtattgttctatttagattggctttgtagacacggtgccctacagggcgatgtttcgggtgttttcttgtgaagattttcgcacactgtttgtgcgctactattctgttagtctactcacacaatagtgatttcctcttgtataatcaatgtaatcgatgtgcccggcatcgacacgcttcgtgctattgcggctcatgcatggagtccttgtggccacatgtttatgtaggggctttatgttagggcatttagagagagctcttgttttcatgggagcgttgagtagttctatggccatttacactgtatgggactttctagggttgttatggccggaagagcatgtggtgtgcgattgacgacttctctaccggattcttttctaatgatgtacacaaagttcaaatagctaataatccaacattatcttcagtctcaaacgcggtatcgtctagagactgcatttaagatgcgcaatcgaatgatcgaatcaatggcatttgaatgactagtctcgaagtttttcagtctgatgccttctcatgccgttgcttaaatgctcacaattcaattgtggttacatcgaatcacggttgtaaatgcgcatttggacttcgtaccgtcgggtgcagctggatagatcactgttacaacaccacatttatcgtcccgctcttactaagttagaacagattgaatattaaacgctcggttctttactaaccaacgttacaagacctttgctatataaggtcaccacatttcattttaaagaatcatcttcaaatcttgacaccgccttttgattgcagggag

SEQ ID NO: 14862 - DNA, 650 bp, Physcomitrella patens
  Intron number 1 from transcript Pp1s35_50V6.1 (locus Pp1s3 5_50V6) derived from phytozome v7.0 (chr-ID scaffold_35; p os 229777 to 230426)
accggtgcgcctatctttcaatcctgtatctgctctaactgcgcattacatgcaatttttgttgttcttcattccgaattctttcttttatacaattataggtcaatcaggtgacgtgatcgttcttattacgtagatctgttgagtggtctggtggctgctttagtttcatcgtttgtctcatggttggggagcgcgttttaggttgtgttggcatgactcgaatggtttgattcttgcactctcagagtttctgcttcgaaatttcgattctgcttgtttgtaggttccctctgtgtttcattcatggattaattgcggtttcgctagcatgtagattttgttgcataataatcttggcagtaattatcgtgcgactttcaatccggtagataggttttgccttagatctagcgtgtatgagagattatcttgttatcggtaagacgcgactttggttcaaaccttagggtttagggtttatttatttatttatttttccgtttagtgtacaaaacaatggctgagaattcaatatactgcggatgaggattattcagcgtctacatgagtagaattgcttggatttgacgtaaagctggtggtgctcctcagggacacaaacgcagctttgaaaagcttgcagcaag

SEQ ID NO: 14863 - DNA, 972 bp, Physcomitrella patens
  Intron number 1 from transcript Pp1s80_79V6.1 (locus Pp1s8 0_79V6) derived from phytozome v7.0 (chr-ID scaffold_80; p os 522998 to 523969 reverse strand)
cacaagtcagtcccatgttccttacctcgcattcttctcatcaatactcttctgttttaattgagttaaatttgcaagtgtaatttttatttatttaattaattaattcattcataaagcattggtgtgacagaaaacaaataaccgtaaccgtaatagtctaagaaattcgtcataatccattttgtggtggtagattcaatagttggtactaggaatttcaacaaccgttcataatacgcattcccgacacttcttgaatgaccatatgatgcgtgcattatcttataattatcagttcctttcccttaactcctctcttccgccttaattatgcttttggaaccactaaaacttgtagtaacgcgagatgataatacaggactgcagtatggtaaatgcccaattttgcactttagtcgcctttgtctgttccgaatggactcttatattttagagggtctcgaactcattaaggaacgtttacgattaggttggtttactttggaaggaagttacacacgtattcaagggaagtaaattgttttctttaatgtgaacttgagcacttcaatatatcggttttgtttttcttgtatttggagaggattctgtgttttttatgggttacatgtttatatgcgttatagcatgtactaagctagcagtacgattcagacttggagaagttctaagttagtttagattcgttgttaggcatagttgcatcacgacatcatgaattctattgaatatttcttcttcaactttgtagacttgaaagctcgagtttctagtttggaatctcgattgcacaaatggccgttttcaatgatttagtgagcttcatgtatggaaactgttcgaagtctcactttcttggtagtgttcggagaaagatatcatacaatatttttgctcattccaatgtgtggattgtggcaggtgagcggttgttaggtactggcggca

SEQ ID NO: 14864 - DNA, 335 bp, Physcomitrella patens
  Intron number 5 from transcript Pp1s165_119V6.1 (locus Pp1 s165_119V6) derived from phytozome v7.0 (chr-ID scaffold_1 65; pos 868489 to 868823)
tgcgtgttgcctctaggtgagtttcagaggcttcttgaggcagttacttagggaggactttatattatgtttggctgagaatccggacatcagaatcatgcttcatcgagtaagcttctagtatgagtgacgtatcctcaattcaaacagaaccttcattcttttcatttcaattttcagggaatactcgttcgatgaatgaacagtcacagttctataatgtaatgaactttactgattttatcttttgtatgtttagtagatacgatgcatctcatcttcacagtttttgggaaacaggtacttcaagggtcctgagctgctggttgatcttc

SEQ ID NO: 14865 - DNA, 253 bp, Physcomitrella patens
  Intron number 3 from transcript Pp1s10_326V6.1 (locus Pp1s 10_326V6) derived from phytozome v7.0 (chr-ID scaffold_10; pos 2549464 to 2549716 reverse strand)
atccaggttttccttcactttttctttaaattggtctctctatttctgatttgtgtttttgctgaacttaactcctctgatgtatagcactgcaacgtcttagtaaagttgtagcattggtagttgatgaaacttattttgatatctactaatgtatttgtgtcaccatccttctaattagatattttcttcttattctgtagacttcagtcttattgcatttaatgctatttttgcagtgtgttaatcttaa

SEQ ID NO: 14866 - DNA, 993 bp, Physcomitrella patens
  Intron number 5 from transcript Pp1s98_7V6.1 (locus Pp1s98 _7V6) derived from phytozome v7.0 (chr-ID scaffold_98; pos 58741 to 59733 reverse strand)
caaggcattggtgtcaaaagcgaaagtttctacaggttaatcacactactcttgaaacttatatactagggaaccgacgttccatgcccttggaactgattggagatgtccagagagcacaaaaagcccgtgtctgggtggttgtacgtaacagaagtttacagacggggagctgtcattgcctcttatttggtacatgtggtttctgcaggctgcggttcatcaccatgtctgaataatggacggacgaatggtatggtggtggcagtggaggagagcctcctgttatgatgattttcttgtgtcaactctactctagactcttgttctgtccgtgacctgcagtgttgtacttcctggctgctgacgtatgtacttagatgggatgtatgtttgaaagcctgcgtcgttatggtagaccattataaaagtgtggatcttataaatcagtttcaattaatatgtaaaatgcatgcagatcattctacagtgtagtcattcacctgtagtcacatgatcagtgctctcttatgtccgaagcacttcaagaagctatttgtaggtagccggcggctctcttcgttttcatcttagttgtctgatcggatgttatgattctgattctgcagaatttgctggacgtgcaacttcttccatgtcgatatgtgtagtatttgtgaacaatctaatatagcgcagaatgtccatccgtatacacaatttaggtgtaaacacgatagttttgtctggtagatgactaggtactgagactagaggtaggatatagtagttttgccttgcgtatatctggtgtgtgcctggtgatattattacttgattttttcacctacatacacatgttccagatattacacctcaaaaatgtgacgtattgagttttttgtttctgattttgcgtcaagcggatttgcagttctgactgtacttgtgctttcaggggaagcgtggtatagagaaacaaccttttcagct

SEQ ID NO: 14867 - DNA, 331 bp, Physcomitrella patens
  Intron number 5 from transcript Pp1s124_132V6.1 (locus Pp1 s124_132V6) derived from phytozome v7.0 (chr-ID scaffold_1 24; pos 895005 to 895335 reverse strand)
cctttccagcaacctcttcttcttgtacatatttggtatggctctccatctcaatttcctttctactgtctacctttcaatctaacatatctagcgtacgatctgtagattgaatgtcggattccagtcactgataatttcacatgagcagttcgtagcggatattctccgatttcagagattttctactttcaattttaaaagcaaatcaatcttactttttggtttttttcctttaagttagatatctgtttttcccctggcacaacattacctctctgtgttaatgttggcagggaagcttgtggaggaagaagaaggaagctttgca

SEQ ID NO: 14868 - DNA, 704 bp, Physcomitrella patens
  Intron number 3 from transcript Pp1s317_43V6.2 (locus Pp1s 317_43V6) derived from phytozome v7.0 (chr-ID scaffold_317 ; pos 281819 to 282522 reverse strand)
gctactcctgtaagtaaaatcatcctgtgaatgagaggtcttttagctgaattcggatagttgtgaaattgggggacgacgaattgcgtagccgtattgatggtaaagagcaggaaatgcagacaaggaagcactggaacagttttggttttagagtatataaaatggttgtcagagttgtacttgattctgcgttgtgaatgttaatgttaagcatgtcaatacgaagaatttggctttccgaattttcatcttcataatagtagaaccccgtacttggttacgcgcatgagaccgttctggaaatacatcatgcctcgcctagtccttgccacctagttgtctttgtagttcaactcctttagtatgcagtgtgcaaagctagcatcatcgggaatcgtttgtgtcatagatagacatacctaccgactcgccctcctggaaatggtgttttctgctcgtttgtgtggatacacccatccagatcttaacttttaaaagccgctgcccaagtagtcgagatttgtgtcagctagcttccatatcctagtgctggaggtaatgctcgtccgtagtagattggcatgtgttgcatctcccatattttaccagtatagccgatgggcagtttcgaaacatgaaggggtctagaagcaactgcgtaatgattcttcgtgcttcttctgtgagcaggcaaattcgaa

SEQ ID NO: 14869 - DNA, 636 bp, Physcomitrella patens
  Intron number 1 from transcript Pp1s25_84V6.1 (locus Pp1s2 5_84V6) derived from phytozome v7.0 (chr-ID scaffold_25; p os 647541 to 648176)
aatcttgtgctgagttatctttctaatccattcaggtacattagatttgcttctgtaaatgaccacattgtgtgtgtgtatgtatgtatgtagttttaaaaaacacatgaatgtaatttgaatagacctgattattacttagtatagaaaatatagtctaataacttaattttaaataatccatacattttaaactacaaatgatactaacaataatctaagggaaaaaaatgagtaattctgcaatcatgtatattaacccttaaaagtaaaaacgattgatggtcattctatcatattcataactgtttgaaacctattgtgagatttttgggatagtattctaaacttttgaaattacacaattaaatgcttctaattaattcacacaacatgtatttatagtttggtacatcacatgcaaatgcaaagaatgcctttaaatgtaataaactaataagtagttgtaaaaaaaaacacattgtaataggatgtatgaatctattttatatttttttaaatcacaacttggcttacaatgtgagaaatgcttttaaatatatatgaaattaaaaatgtgattgtgggatcttatgcacaggtgtttgtgcaaaacaggtgtcattgaagaaggaa

SEQ ID NO: 14870 - DNA, 292 bp, Physcomitrella patens
  Intron number 1 from transcript Pp1s17_210V6.1 (locus Pp1s 17_210V6) derived from phytozome v7.0 (chr-ID scaffold_17; pos 1362116 to 1362407)
gcaacttgcccgcaaggtacgcgaatcatgttttggaggcatcatttcgaggcggcacagacaattaacagacagagaatttcttcgagattgagtgggctttgttggtagttgcagtgaacttttttccaattcgttgccgagttctatgtgggacttcgcaactggttgaaaattctgtggattttgtattcatcccatgttcgacttttctgaggaaattcctgaggtagttttttttttttttttttttttttttttttccctctctctctcacagacccactcgcac

SEQ ID NO: 14871 - DNA, 1254 bp, Physcomitrella patens
  Intron number 1 from transcript Pp1s55_117V6.1 (locus Pp1s 55_117V6) derived from phytozome v7.0 (chr-ID scaffold_55; pos 765184 to 766437 reverse strand)
acgtatacgggcgccgatctgctcacccacatcaggtatgtttgccgagtttgtatagtgtgttcttttaattttaagaggagtctggtttgttttgatttggtttaggtcgggttgttttgtcgatgctcagtgtgcaggtttattctttgtgtggtagtgattggaatgtttcatcgtcgaatctggagtcaggagcttggcctatgggcttagatttcttttagatttagggggatttggttttgtgaaagcggtttttgacctgcgatctgagtcaacaggctgttctagagctccttcagcttctaagattgctgttttgtagactagagttttatttaggtggagtcatgcactgggaatgacggtaggaatgaattgtgtaataaatcctggtaagttctgttctcccgtgcatattgtctttttcatgtactgcctatgccagtagttgtcaacctactcctgtgtatctatctggcgaaatcgttcccgtgatctaaccttcgattttgttgcgcgaaatatattacagtgaaatttgtagcttgagtcggacgctctcagactatgatctactgcaccaaaaccctacttctgtgtagcgcgcctaggcatgtctaccagctcaaagtacatgattgtcaatcgcagtaagaagtagaacatagttgctcttgcttctgattagcacttaaattcctttggaatacagaaacctttcgaacctctgttcacttaaagaaaaatatggatagaggagttgggctagtactttctaatcgtatcagaagagcttacgatttcatagactttcttttgaaggatttaaagtcatagaatgactctctgaagacgtatcagtccaagtcatccataatcgccttgtgtgacatttgcgcccttatttttagtgtgaatggttttcctgggctgatgaatagttgcgtaaagtttgtgtgccaagctttctttaacatgtagtcatctcgcaggtcttgcttttgatatggttgtcgatgaatcttttttgcgtagtgctaatttatgttcatttagctgttgtatttttccttttaacttgaggagtttagtaggcggtttaagttaaagcatgcagatattatgtgtaaagtgcatttatacccttcagtttgccaacatttgtttccttgcggcctttctgttgattttttagccttcttgtttctgtcaggttgaaattgaggtagacagtttttgtacttgagc

SEQ ID NO: 14872 - DNA, 1577 bp, Physcomitrella patens
  Intron number 1 from transcript Pp1s95_20V6.1 (locus Pp1s9 5_20V6) derived from phytozome v7.0 (chr-ID scaffold_95; p os 94891 to 96467 reverse strand)
aatcccgagtagtgagaacaacttttcttttctctttcctgtgttgttccttgcttgccggtttccagtgtttccatttcctgttgcgtatgacgggtgtttgcatgtgcatgattatgtccatttttttgcctcgtaactctcggcttttttgagccatagtttgctgttcaaactgtcgccctgggaaggaggctctctggtagacggtctttcaacccttggagcgttgtagtcgtagatcgcccttgctgcacttgactcggatctccagttgcgtcgatatggtttccagctttgtcacctcgcaatcctttctgaccaagtcatatattgtgtctgttttatttcctgaggctgttgtttgcgtcggtactcttgtccgcttggagccttggctgtgatggcttagaaggagtctctttaatatacgcaattttcagtcttggcagttcttttttctattttctttatttttttaatttttaaagcttaattattccattcgtagttgtagatcgctggtagtgtgcatggactcactttgagatgtatgttatgattcttggttattttcaccttcaatcccatgtgatagacgtctgagatgtctggtttagcaagaagatgtctggagtgttttacaacctggaaacgaggcatttgtgactctctgagtcaatgagcgatccagtttgagaagtacgtttcagcttcttgattttattctctgtaatttcttgtatagtttggatgttcttcgggcaggttatgatctttaggaggacaccacattttgaggcatttacaggagatactacaggattaggtctgtcgcggcgaattcggttatgggaaatgaacattttcttcgcatgattccctcaattctacatgggtttcggtattttgatattttttggtggatttggacacaagtttacgtcagttcgtctcactttagatttttaataacgctttcagtttgattctgtgactggattgtaatgcaactcatatcgtttgattggtcgatgtttgtcaattttcctagattcacgtgttgttccacgaaaacataaatcaaaactcccgcaatcgctgctgcgcgaagcaattccataggaattgcaaagttcggtgtttttttaacattctataatttacgtgctagcgtggtgtagtcacctggtcgaaggtgatcgaaggttggctaggacatcgacattgatttcttggcttcgtgggcattctcttagactagtttttagaacaactggacgttcttatttaaagctcgaatcggattttctgtcattgttcgtaagtggtgataactgaagcgcaatacggatttgtcaatccacaaacaatctactaaaacaatccgaattttagatttcggctcatagtgttcgataattgttctttgcatgaagggtgtgagtgtagttcacagcttctactatctgttcctgaaatttgacaagggctgtcattctcgatctgaggcgcgtctaaatcgaatccctctttctgcagtgactacctgtttaagctccttttgattggcgact

SEQ ID NO: 14873 - DNA, 1291 bp, Physcomitrella patens
  Intron number 1 from transcript Pp1s336_34V6.1 (locus Pp1s 336_34V6) derived from phytozome v7.0 (chr-ID scaffold_336 ; pos 124777 to 126067)
atctcttctctgttgctcgtgtgtgtttttttcgggtaagctgagcgttaactgttgttgggtgtgtttcgaattgggacgattttgggtggtcttcaattcttcttctgtgtttttttctcttcgcgcagggccatgtctcgagaccgtggcacttgtgtctttgtttcgttggttttttctttgtgtgtatcaattgaattggtaggtggtggtttacatccacgaatgcaagtgcacgctgtaattggccaacaaaaagctgtaattgagcaatcgatgttcatgcttaccctggatgctgcgcaatactgggtgatgtagacctagcgtagagatagttggtcgatttttccatttctgtcagatgtagggcgctattcaaaatttatcaccctgtttgagtagtaccatatcgccgcggcattttgagtttggagcggcgcttgattcaattttaatttaacccttgagttgtgagctatgaggcgtgtctcgtaatttatcgtgcagttcgtgcagcgtggtttttgaaatcccacatccgacggttttcttcgtttaggcgggggactatcattgaactttttaattgttatggattgttttgcaacttacggcaatgtaggggttggatttggcagatgatctttcctccctctgtctctctgtctgattctctcttcctcatacacaatgctaacaaattaaaatcctgtttatttgtagtttgtggatagggatggttaaaaagtgaagaattttcatcaaattagacttcgaacccagccagtttttatccgggcctttactatgttctttctcaggaaatcataaaactgagtgaaggtgagatatgagtttgaagactatgacatcgtagatgatacgaagctgaatgtatttagtcgttgttggtgtcgaatcacaacagatgggaaatggacagttttcaatatgtttttttagagtggaatcttgtcgtgctattgttgcatattgagtattggttgtatcagactagactggttacttgaccctatgtctgcactactagtgattgggctgagccgactcgggttagttgcatactcgttatggatcagcttctcacctccttgtttgcagttcaacaagatatttgtgtgccaactacgcaaactgctcgtactaattctcagtcttcttttattccctgtattatttcataaaatttgaaaataacgctgttccgctgaattttgctattggagtaggacaagtcttcagctctggatcctgaggactatcg

SEQ ID NO: 14874 - DNA, 899 bp, Physcomitrella patens
  Intron number 1 from transcript Pp1s199_22V6.1 (locus Pp1s 199_22V6) derived from phytozome v7.0 (chr-ID scaffold_199 ; pos 106581 to 107479)
ggcacaaccgccagttcttaggcaccttgcttcatgtatatctctgttctgcttcgcatccgatttagctacccttgatgtctggacgtggcgatttaagatcggcgtagttattttgttcttgcttggcaaatgtgtgctctatagatgcttcagatagtttgaagttgtttttgcgcactcgggcgcatgattcgtaaggatttgcggtttgcgtgagtaattttatcttgttcacatttatatatatatatatatatatatatatatatatatattgcatcggattatttgtggtggttgtctattgcagtgaacttattctggattttttttgcgtagtaccggccaactgatttcctctgtagctagccttgtcgtggaagaaccccgcacttctcatgcagtctgggcgagaattttggtgaacttataattaatccgccacttcgttgtctgtcggggtgctgtagatggtttcgctctttgttaaaattcgtagttgctccggaataaatgtcgatttcgaactgcattgaaagaaacccgtggagttcggctgtttccaggcagataatacgagttcggatatcacattgcttatctaaatctgtagttcgacgacaccgtctcgctactcacttgatagaatagggttctgccgttgctagaaagaagacggtgcgtcgaatacccaacgtcatattctggattttcaaacttgcaagtttacagctgccacttaagcagcggtttccttgccgcgcgttctgtagattgcagccgtctaattgacgatttgcagatataccctggatttttgatgcagagcattgtgattatgtgttggtgatgactctgaggcttacgatggttttttcggactgcagggcttcgca

SEQ ID NO: 14875 - DNA, 422 bp, Physcomitrella patens
  Intron number 6 from transcript Pp1s66_226V6.1 (locus Pp1s 66_226V6) derived from phytozome v7.0 (chr-ID scaffold_66; pos 1077073 to 1077494)
gggattcgaaagagcctacctcaaaagtaagctttatgtctttgcaggcgtgatttccctttgttgggatttggtagctaaaattaggtcaaatttcaattgtattctgtaaaattatatcttcacaacatccggtgggatatatggttagcttatgtgaattcgtgttaatttgttttatcgattctacatgcttgtcctgtgaagcttttatcactgaggattttaggagtcgcagcatatttcttggatactttgttgttattggttcaggaatatgttggtgatcgcgtctgtaattgtttgggtgtggtggtggtaatttgtatttttcgtttgcttgctaagttattcatttctctaagtaaatttatttgggtacgaattattatttttgcaggaaaaaagttctggtgggaagc

SEQ ID NO: 14876 - DNA, 3382 bp, Physcomitrella patens
  Intron number 5 from transcript Pp1s75_191V6.1 (locus Pp1s 75_191V6) derived from phytozome v7.0 (chr-ID scaffold_75; pos 1038276 to 1041657 reverse strand)
cctgtgaagcaagacttcaagcacagagaagagaggtgcacaaattcctcttgtctgtgatgcaatgctttgaagtttcgtagaagtagatttctgcttctacgttaaacactgtacaatcaactattgtctcccagtttccagtttatgcacaaattcgatagtctgatcatctcaagtccccgagtttaacaattcacttggaaacgaaattttattacaagcttcaccaatttgtctacatggaaatgtaagtcttcaattgacccaacgagtatgatcgggttcatcaaacctgaagtccaaaatctgtaaaacgtacatcgcagaccactgacaccaggtctgacggagatgcattgggagaacttgcttcaaaaaaccgattttctcagtcaacctcctcaggatttggttctacatgaatgcttgtaagtgattccaatctgaaaaaaattgcttccgacttcatgacatctggatcacagcgcttcaatacactctcattttgagctatctatagcttttcagttatcattgatgaaccatgcattttttgaagcttttgcgttcaagtgaccttgttcaattccgacttaattagagtgcggctgatgagtggagggtgagaagtgcctatgcagtcaatgcgggaggactttcaaacctgaatcgttgaaagtgcacttgcgtggctgtcacatcataaacaagcccaagccatcggtttacttcagtaagagagtatccactacctaaacgtggtgtcggacaaagctcgaacaaagtgtggaggccagcatgcatcgggatgcatgcttttgtagtattcttgaaaagctctctgttgtcagagaggactcgatgtagagatatctgaaacatggttgcagggaaaaagattttcttaatgatgacttcgagaattcaaaacaattgtctggtaagttaatttcatgatgaattacttttgcctcaaacaccacaaaactccctgttcgttgaaggtcaactgtattccctaaatgtgtaagcttgagcttcaaacttgtgtttcaagccatcagaacctggtgacaactggattgattccattaagaccttccggcatgaacagatctgaaaatagagaattgaaagggataactgcataggttgaatggattcgcctgctacaggcgatgcttgcaataatatcacctgttctgagtccttcacacgtctctgtgagcaaattcgtcacttaatgatttcagattgagggtaattcacactcagagtgttgtgtggaatcccgccgctgtatacgtttaggctagagtgtattatgataagtacgttgacaaattcctcgcctggggaattccatctttgggcaatctctgaacgtcggtgctctttgggatggatttgagcactctgacataactcgtgtactatcggggatgaagcccttaatcaacgctggtccactaatctgcgcacctttgaataaaacgtggtcccaaactagtcattaacgattccattcatttctttattcaacttcaatttattccagcgatgaagtcccgctcccgaacgaagcgggtgactaccacagatttttcatggttcaagcacttgatatatttacctgctcctaatgcccaaccccgtcaaaagatggactgagcaacaaacaaaagaatcctcttaatagaatgggtcaaaccgttaacgcttgatacctctggttcagatcttgacatcgtcattttggagcattaataatcaactctctcaagcaccggtcgctgatccatcatcgtcctttcagttcaatcggcaagacagcctgttcagaccaggtgaaaagcctaatcaacgcaccgatgagattgttgacggtaacggcagccatttccagtttttgcttcactggcatgagtggacagaagcgggggacgttgagaatatacggcatcgacgtcaataccgagtttgtattcgtgtagaatcttgctttttaactaaaccgaaccatcatcgccggcattgacttcgcacttctaccaactcgtagacggtgccactcatctctacagcagagatggcagattataaatattaaatttcgggccgattcccatcgacgtgctggagtactctctgaagttgacatctccgacgacacggtaaaccagcaagtgtgaagtgatgaggtgccgatgacgcaatggacatgaggtcactgaaacgtcggcaggtcaaagtccccaaatagagtgcagaataccaacagcagcgtaactggatctgttctagaatcaagaatccagaatccggaacatataccccggcacacgacctaccaaacacgctagtatattctaacataacgttcccgacctttttctgggtgtggtggcatcacgatctagttctgagcgatctccggaacttggttgtggggtggggctaatcctgactaacgaggaggctgattgtgaaaaatgcggccgaagccgccgcaacaactgagtttggctttttaggtttgttatcttgacaaaaccgtcgattagaagacctcgttgcagatatcgcttcactggcggagagatgacgcctcacatgaccgttttgttggttcaaaggttacagacagccggagtggttagtgtgaaatttactagagtactgtagccacctgattcatgatccaggttttgataaacctatcatgtgggacccgaggcggtagcagtgcccgagtgaaggagattgtaacaggatctggaatttcatgtgtagcaccgcctcatcctcacgctaccattgcgcagcagaaatgccagagattcatggcaacttgggtactagtatctcattattcctggttctagtttttcgttgaatgagctgaactggcttgccgcatcttatatttagaagatagctcaagtggcttcttgtttgtatgcggtaggaatcgaccctatctatgatgtgtttcagccgactctgtgcggttacgtgggtgcaaaggcttccatgtcgcagtgctcaggcatctaatattgccttgacctattatatattggtgtaacaggttattccgttatttgctggttcatttggagacagtttcatgtagaggttgtatctgtgaagatagcgtctcgtccttgctaggaactgtgtgctgtacatgcaactctcaccagatgttacacagaattgttctgcatatcaaggcagcctccctgccgccctgtaacccagctatttgcactgtgcaccttagtaagtggcaagacgaataatactgtgtagtcttgcaacttggatttttgtgtttgcagcaaagtcggtgtagtgaataggaccagctctactg

SEQ ID NO: 14877 - DNA, 616 bp, Physcomitrella patens
  Intron number 5 from transcript Pp1s52_134V6.2 (locus Pp1s 52_134V6) derived from phytozome v7.0 (chr-ID scaffold_52; pos 1119379 to 1119994 reverse strand)
gccttcagtatcttttcttggtaagagcaattttttatcattcattcttaacaagaggtttgccactcataacatccatatggctaaaaagttcaaagtttctttgcatttttgttgaaataacttacgattttacgaaaatctatcaaaaactaaacgcctctttttcgaaataagaaattaagagtgcttagtttgaaatacgagttggatacaatgctaaagagtgtcaagaatatttgcatcatcttttgtagatataataaatgattgtacttcaagcagttctgcaaggagttgagtactttgaggactaaagcagcactttgattagtgatatttgtttataccgcgatggaagcaagtatgaccttttgagttttatttgggttcgatgtgagatttatggtttgcactgcagctttaactgtgctgtaaaaactcgtgttcgaaaattcattttcatgagaataccaccacgcgaattaagctactgcggattgctagcgcatctgtaggctccagcacttcatagtgctattagcataaattcttgagaatatggatagcatgcaggttgctgatgaattcttgtttttccaggatcccaacccag

SEQ ID NO: 14878 - DNA, 844 bp, Physcomitrella patens
  Intron number 1 from transcript Pp1s37_154V6.1 (locus Pp1s 37_154V6) derived from phytozome v7.0 (chr-ID scaffold_37; pos 940285 to 941128 reverse strand)
ggcaaatcagaattttattggttgtcatgtacagattaggaattgatttgcggcgttaagttgaggatttgttttttggttttttttttttttttttttgatgttgttgtagttgttgttgttgttgtttgtttgtttgtttgtttgttttgtttttttttttttttttttttttttctgctgaggtttcactttcaattggagtggatcttgctttgcagacggtgtttcataagaaatctgcagcaattggaatgacatgtattctttggcagggtgtattgatattagctttagttttggctgaaaaccttcaaatcgtctctctcaaattattaccagttttggacaggtttacagccgagcgaagtgcatgattgattggattctttagaattatatgttgcggggtgtcctaattctatggaaaatgcacatcattatgaataaatcgacatcacggtgacatgaaatgctcggaacttgcgtgaattgatggtaaagaactcaatacagccaactcattcactgctgaatacatctgaacgaatcgattgtaaaataatacatggtggtttgtaagaacctattagtcaagcctagaatctagttcatatcctctcttggtgcaacgcacatataagcttggtaatcattacagttttaagcattttacctggaaggtgtatctctccaagctaattgtgtacttgtctctaccgttggagcagtctcgtagttgttgctgcatctgtaccgttttgttttctgtctaatcacgggcgattaatctcttcctctttgttaccatcctgattcattgtatctctatattgctcagaca

SEQ ID NO: 14879 - DNA, 1558 bp, Physcomitrella patens
  Intron number 1 from transcript Pp1s383_16V6.1 (locus Pp1s 383_16V6) derived from phytozome v7.0 (chr-ID scaffold_383 ; pos 127012 to 128569 reverse strand)
ggaggcatcgactgctgtgaaactggagccaactggttctgtttcccttccctctcatttgtgttgttaaaaagaaattaataataaaaaaaattaaaatataaaaaaaatcaaaaacatttgtggtgtatctcatgtgaatccacctgttgtaaggccaacggttggtttatggttgcacctcttgcattgaatcacgaagcattcggtgggtggtccttgatcgatagtgcttgtgagcacctaatgtggcgatttcaacaaagttgcgattgcggtcttcggggttggtgaatgctggaacccgcatcaacaactttctgttgttttttattgttgatttttcggtattgtacacttgttctatcactgttcgaagtggacaacgaccttagtccctgttttattcttcccttccccgttggcggctagacgcggtgactttggtggactcacttcggttggagtatgatttggttgtcgtcgatggcatggtggagattgctgttcaacacaagggtgcatggtagatttaataacagctcaccttggacttttgtatagctaagtcccaagatcctattggtacttgcagaggtaagagcaatcaaatgtttccaagagttccaagtgggtgacaaattatcagctcccttgtcgaaccaacgatcagcttcgacatgatctgatatattccagttgtcgtcaccctcgtattctcgctactagtgtttagattttggcattaggacctcacaaagcaatcagcaaagctagtactcacttggagcattatcattttttgttttttttcttgaaatccagtggtaagtagagtagacaacccattgacgcaaggattggccattgggtcaaatcgtgatttgcaaaagtagcagcagtgtcctcaggaggaatttagaattagaatcatatagtagttcacttttgataaaagaaagccctctcgaaagtcaagtgtgtagttgagagggttgtcgagattgaagtctgaacttctactgttagcatccttatcaaccaacaacccgattgtgatttcaagatttggtagattgcaagttgtccacacagcttcaacattcagcctggttagaaggaacttgcatcgcagaggctctatcactgcaaaaggaagttggctaaggaactatctacgtcgaataaaaatccattgtaaaaattattcttgtaaagatattgattcttatggatgaaatttgtaaatataaattgatatcaaagttttggcttcattgagtgatttagttaagaagaataaagaataaattgaataggatttaattaatagttataacttctaaaattcacatagttaatttacttgttatgaactagaataacctttcaactagtggaggtttattttagctcacattttattgcatctaccaagaattctatcttataagtcttaagcttatttggaaggcaatttttttattactttatattttgttttgtttttatctggtgctagtacaatcttttgttgttgtacaggaacttggagtaa

SEQ ID NO: 14880 - DNA, 332 bp, Physcomitrella patens
  Intron number 7 from transcript Pp1s213_35V6.2 (locus Pp1s 213_35V6) derived from phytozome v7.0 (chr-ID scaffold_213 ; pos 259896 to 260227 reverse strand)
tcctccttgatcacccaaaggtacatccacactttgttatttacggcgcagcgttgtgtagtttttattatttagatacataaatagatagatagattgtctttgtgttaaacaaggacggtgagaaaattctgtcaaattccatcctgcacatgacatatgatcacaagaaacagtcgagatcttcctgatttaatgcccttttagtttgatttcgtatgctaaagtgcgcagtatctgttgttagaaatagttctttctttcagtactgagttgacacttgttttgcgctgcatccacttccggcggtttgcgatcaggtagacgtcttc

SEQ ID NO: 14881 - DNA, 1799 bp, Physcomitrella patens
  Intron number 1 from transcript Pp1s36_260V6.1 (locus Pp1s 36_260V6) derived from phytozome v7.0 (chr-ID scaffold_36; pos 1720781 to 1722579)
tggtcacctgtgcagctccagtcaccatattgacagtaagttatgtatatatatatatatatatatatatataataacatatgtacatagatatctttaaagaatgttttgttttgcttttgagaatggtagctgtgtacattgcaccatattcaggaactcctgtcgaagggtcacgccacagcttgttgcgtgcacatccattgttgatgtcgttgtggtcgttttttgtttatatcttctttgttatttgtttcactatttatatgttcatgccctcgtcgtttcgatgtatctagaccaatgattcaacctggtgagcgtgttcacgagatcaacatccccatctttgacaaactatcgcaaccttacagaaagaccatctgtgtgatgccaacgtcgactttgctgattctgtgccacagctttttggtttagactgcaacttctcgacaccgacgaaagctctgtgacctagtagtggatcatccttttcgcagaatatctgtagatccgtgtcagagtagacctcgttcttgtggaattagttatacggctctgaacattggcccatgtagagtaggattcccattgcagtttctgcatgattttttcagttgactgaaagcttgatctgcagttgcaatccttgtcattagaaaaacattcaaaatattaaggaacatttgaaaatacaacttgactaaactggcagattcgagaggcatgttgtgggtgcagttagcaggtgattctagtaaatttcggcacgctctggtgttgcatcgcagacaaccgcttggttatacgagcaaataggtgattagtgacagtcactcgattgctgaagaatagttagcattttcgatcactgtttggagcgaacaggaatccgtgcttgctgtaacgaattcgttaacgtagatgagtgaatcatctcgttgtcgtccaaaacagacagtgatggatttgttcatgatcaaagtcaaattaagatccagcaggccgacagagctgcaacatacttaagagatcacgtttcgtgtttgcacaccatgagaccatcgaacgaacctttgcccacatgaaagtctatacggtcgggttatcattgaaccctatcaactccacacatccaaaaactgcaacagtatgcagctctgcacagatcattggactacttcacaactagagtgccggtctcactggtcttgttcacagccgctgccatttgaatcgccttcctttgcgatgtatgaatgaatcgaatgctcatcatctagattgatggccttgtctctggccccacttctgcaacctcactgggttcaacttcagagtctcctcatctggcacaacgagaacacattctcacaaacaaaccagacatacaatcaaacaaaacagaaaaacgcggggatgggtcggtcctgacgtgtcatgtgccacgtcgtcgcgccgtgcgatagatggtctgtcgacgtggcacacactctctctctctctctctctctcaagctgtacttcttggccacatgttggaagttttggaggaggttccctccaattatgggcatcaaaggaggagtggaatggaagataaacgtcaagtagttcaacagtcaaacaatatgttattgactctcttttgcaattctttcttttttagtggtgattccctttcaatggcttatatatatatatatatgtttagttttttttttttttttttttttttttttgtcgtcgtatttatcttatccccatataagttgtcttttagtagagatacggagaag

SEQ ID NO: 14882 - DNA, 724 bp, Physcomitrella patens
  Intron number 1 from transcript Pp1s139_27V6.1 (locus Pp1s 139_27V6) derived from phytozome v7.0 (chr-ID scaffold_139 ; pos 291464 to 292187)
cgacatccgagtccccttcctccattacctccctggtacatccacttcgcctcttctctctcgacgtgcacgaattagggtttcattctccccgccttacgtattctaagaattggggtgcgtcgatggattgggattgggattgggattgcatgtgtccggttctatgaagatttgattctgtgggtttgtggggatagtcgtatatgagatgccggttttaggttttggagttgtcaacttttgcgaatttcttgacgagctgttttggagtttaatgtacgacctggtcatgttttttgtcttcttcttcgtattcttcttcttctttcctgtctgtatttgctcggctggatttcgtagaggagaggatgtctacatgatgaattacccttccagttcgagattttgaacactatagggttaagtatttgagagctgagtaattaccaaggatatggatgatctgtaattcctgattggatgggtttcaggagtgcgattgaactaaggtccttctagcttgggcttctggattagattcggtatcaaatccatttgaggaagcagtgtgcaaggaagtacagagaagtaatgagaatcaggtgttgtctttaggcagttttaatccgcgagttttgaggatctttcgagtttttaattcttggattctgaatgagagaagtgcatcattgcaggaatattcgcaacaattgcggcattg

SEQ ID NO: 14883 - DNA, 350 bp, Physcomitrella patens
  Intron number 3 from transcript Pp1s130_242V6.1 (locus Pp1 s130_242V6) derived from phytozome v7.0 (chr-ID scaffold_1 30; pos 944066 to 944415 reverse strand)
ccgcaaccccgtgacacacctcccaaaagaggtacctcttcacaatcacgttgggttactggactgtatttcgcattgctgaagatacatcacgtgaattatgatttaggaagtttcttttcgaagggagtagagaacctctgtgttttaacgttgaatctagtgtcttttcaaatgattttttcgtagaggtatgactagaactctctaagaatgtctttgcaaagccattgcaacgtgatatctgctgtctattgtttgctgagtatgtgtattctgagaaattgtttgttttgtttgtctgtttttcttccgcgggttgcagatacagggattgcgagcgagaagga

SEQ ID NO: 14884 - DNA, 689 bp, Physcomitrella patens
  Intron number 2 from transcript Pp1s121_135V6.1 (locus Pp1 s121_135V6) derived from phytozome v7.0 (chr-ID scaffold_1 21; pos 933227 to 933915 reverse strand)
gcaaaggtttttattcagttatcacattttttttcggtgtctttgtagtttaataaggttttccacttgatatttctcctgctcctgcacaaatagacttgataagctgagggtcgatttttgaatgttcctcttgtgctttcatagcccattcagggttatattattgcagcttcattttttagttagtaatacaaggaacgtgctaagaatcgaactggaaacctattgtgtatcattagttcgtcagaatcgtgatagctataaagtttgatactggaggatgacttaacaagaattgaacttcgttatcttcaaatgcttttggaaaggatgaaatgttttggcaatttcgggcttctgtggacaagtctgttcttggctaaattttaaaatcatttatacatgatttgggtcagagtaacgatcacaaattctatgaatcaaggaacgtgggacttttaattcctcatttgaataattgtgatggtagaatcacaagtaaaattggtgacgacttttaataaccacgtgagtgctcaaaggactcgatgtgtagaattgaagtgatgcttagtacccttgcgaagttgctaagtggagcctagtgctcttgcgaagttttactaattgtcttcataatcaaccacacaggacgaaagatctgtccacattgtctacgtggagaa

SEQ ID NO: 14885 - DNA, 835 bp, Physcomitrella patens
  Intron number 1 from transcript Pp1s81_54V6.1 (locus Pp1s8 1_54V6) derived from phytozome v7.0 (chr-ID scaffold_81; p os 334351 to 335185 reverse strand)
gaagaggtatgttaggttttgttcctgtgaggccgtgtgggtgcataatgtaagaatctagtgacagtcgttttttttccctgtctgatctttatgcttttcgtttgcgacttctcagttctgcatatagatcctcttttacaacgaatagttgtggtattgtttttcaactccattagggtcatgtttctctagaagggccgagtttctttttagcgtaacatcagcccgagtccaagtttttgcattcgaggaaggtggtgaacgccacataaccagagacttgtagaattagatttgagggaatcgtgaggtgcttttttggctgcaagggaaagcagggtcacgagagcgagtgtgtttttccttgagtgtggacgtggaggccaatctgatcatttttagtttcttagcataagttaattcggagattctttagattgaaccctgtgtctatttgaaactagtcttgcagttaggaatggtcccagttacaaatccttgacttttggaataatctattaaagaattgctaccatttttgtaagcaaatgggcttagtttttgttcgtaggttttacagttaccaagcattgtaaagaggaagtttttctccatcatgtgcctttgtgatgtagtattttggggaaagtttcccaacagagtagaccacgctagttcgattgtataattcttcatagatgccgatgggtatgcaaatagtcaatcgttgtgggtacgcgatttaaggaagcgcatggcttggaatcaccttatcttgttaaggatgttgatgacaggttgaaggtcaagttcaggaagtgatattcgacca

SEQ ID NO: 14886 - DNA, 380 bp, Physcomitrella patens
  Intron number 3 from transcript Pp1s83_225V6.2 (locus Pp1s 83_225V6) derived from phytozome v7.0 (chr-ID scaffold_83; pos 1450472 to 1450851)
tcacaagctggtgagattcatgtgatttgtctttggactgtgatgaaagttgcggagttcggaattcatggacttgatttatatatgtgaaagtttgatttatatatgttcaaaagtttgatttgtaggttgacaatggtcatcggagaagaattgttttgagtagtccaaattaaggatgatttgggaagtttttagtgttacggctctgatctttctccccttgttgtcctatgattcagttaaatagggatgcagttctttctatgatgctatgggcggctttgtcaaagtattctggccagtaaaagctgactcacactattcattcgtttgctgtgttaggattcccaatcatccggggggcagtctcatccacg

SEQ ID NO: 14887 - DNA, 2654 bp, Physcomitrella patens
  Intron number 1 from transcript Pp1s277_6V6.1 (locus Pp1s2 77_6V6) derived from phytozome v7.0 (chr-ID scaffold_277; pos 15937 to 18590 reverse strand)
agtaactgttgcagcgctggaaagtgctcgagcaggtgagacaccgcttgatcacagcacaaggagcattggagacattttagcagtcgttgttgagagattgttcattctctcgtgggctacattgctgaatttgttggaactgggtgagtttgttggttctgtgagccgcagcttgtggaatactttacatatttgaatggtgttctctcttgcacacaggcaattctaatgtgttatttcatttgtaaggttcttcatatgattttggctcacagctatgtacttttcacctcagtggactgtgtctgcttgattgtggcgccttgaataatttagaattcaacttgttcatgatttgagacgggaggacagtttatgtgctgttggttacacaacatgagatgatgaaggtcaaaccttccagtcatgtctttcaacttcgactgcgaagcgctccgcaaccatgtaaccactgtatagcaatcactctcttctgatcgatgtcacatggtctgctacagatcgtttcactgtagttgcttagttgaacctaatcaggtccaaaaccacctattacaacaggagggtgttgtcagctgttaacttcacagagattttaggcatctaaacattaacatgcaaatccttcatttgatgggtcgttacccgtatccagcacatacagttatccctgcaatacacattataggtcttgagcaatgtagaatcgctttaaaatgagaacacacccaaagagggatgcacggagagaaagacggttgatacttaggtctgcccttagatctaacgtcgtttagaaatcagggatattacattgatgagagaagtgcgacgcattcatgaggccatccgaaggctcactctattgggaaccattcttgcagacaactgggatgagaaggcctccatgcttggcatcacctgagatgggacccctcgctaatttgaccgactccttcacgactctgtgtcacacaatacagaactataacgaattcccagattgtgatctgctacaaaaattccacgcaccgattaaatcatttcctcatcgccactggctttaggaattggatgaatctatgcaatgacttttgaaatgctttagatgtagtatagtttctgatctagtctgtttgcagaagccatcagaaagtctgaatcaccttgtagactctgcaatcaaaagagagatgaagcttttctaacacgtctgcatctgagctgttttagcggttacttgcttaatttacgaagaattattcgcatatctggttgtctagttctctcaggctgaaaaatttctaaaccctacacctgctcaagctgcttacgagtgagtcgttctctaatttattcttcctcgtattttgaactaattttatctcatgtactatcaagtcatagttccacaaattccgtagctcatgatttgtaaatttgatgatactacccgctcactccataaacgtattcacggtgatgtcagaggaatttacaccgtggcaagttgtggggcgggatcctgtcggggaatgggaaaaccagctcacctgctcatccatccacctagtattggtttccgatgattctgtcgatcccttcacacagaattcgagtgtcctcaacggatccatgtggtgcttcaccgttatttctttttaaattattaaatagatgaatacacgagatcactaagaccgaaagatgaatatgagaagattcaatcaccgcaagagtttgcatttcaatatacatttttcagtcacgcagaacacgttgggatcgattccctcgtatgtcttcgctgaatatctctggcgtgtcaacgatggatgaactgctatataaatatcggatggctgcatgtcaatgcactaagtgcacgtattttttgacacaattcgaaacatgtcgcaattgcacgatctgaaagtcgtgtctggttgaatcattctcttcgcaggactgatcgagcagaggaaaggttgatttggaccagatcatctctcaggatttctgtagactttcccgtaacaacgttcgttctaaattaaattccttcgactaatttttctacccttgagggcctgctgtgtgctctttaagcttcactagctagtttgagtcattctaacatttctcagctcaattgtgcctaaccggtgccaagcagtagactatatacaaattattttttgtagagatgttacgtcgtggttaagaactgctcctaacctctaataactgtgagatatgttcaccttgtctcctacctcgcttttgaatgttgaagatgttacccagagcgcaagtaacatgaaatcgtatcgtaaccttcacttcgcatgtcttttatataagggccgcctggagtcgtgaggactgggttcaaaataagcatacagtcgctgacgaattcctaatgatcaagaggaaagacatctgatgtttggtttaactgcgcaataataaattcagttgatttcgatatttactgctttcgatatggtcccaacagtttgaaaataattcaatggaaaagaggatcaaaagttatttggccgtctccagaaacaaaagctaatcagcaccaatgtgttgtgatacaggtcattcaaaatcgaagc

SEQ ID NO: 14888 - DNA, 932 bp, Physcomitrella patens
  Intron number 2 from transcript Pp1s138_81V6.1 (locus Pp1s 138_81V6) derived from phytozome v7.0 (chr-ID scaffold_138 ; pos 343259 to 344190 reverse strand)
tggatcacggtacgtttatttcacctttcttctagttgcgtttggtttacggtgttctgttgttgttttcttggttctggaacgtgccccgaattgtgcaactgattattgacttcaaatctggtacaagtcttcgtaggttgtatttcgataattattcatctggagttgcagatgtggtttttgcgttattactgttgcgctcgagtcattagttgaaaaagcagattgagatgatggtgaactctcgaaacaactaaccaaatgtgtcccgtctcacgatgataaactgctggtaatctggctctagtttgtttaaagctatcttcatttagatgtcgatttcataatcacatcgatatcggctgtagacatcgaaaaagataataatttgattgtcgtttgtgttaagtaaactagtgggaattcttcttttagtctcaaggttcgactcctaaacttgcattcttgaaaagcacaatacagtaaacactcagaattccaagggcgaacttggtccgatgaatcccttgcacatgagctgagtgattctatttatgctgcatactgactgaattagtggtttagtccgaatctctgatacttgataatattttcagacgatacataaacttgtttatacagaggtccatttataagtttgagtctgtaatcatggagaattctcactgtttcaagttgtggcacatagacttctcaggcaaaagtcaatctaaatgatcatcttgtctcctcgcaaaagaatatcagcgactctgtctccgagttggtagctcgaaagacttatagcagtggtaacaaatctaaagaataggattgacgacaatgaacgtgaaggtcaagttgacgatcatgagatttggttgtggtttgcaggaaagtcgactttgacggattccctggtggctgct

SEQ ID NO: 14889 - DNA, 2437 bp, Physcomitrella patens
  Intron number 1 from transcript Pp1s29_308V6.1 (locus Pp1s 29_308V6) derived from phytozome v7.0 (chr-ID scaffold_29; pos 2282774 to 2285210 reverse strand)
gctggtaagtgaagtgcctcttatttctttttgttttgtacagctataaattcttttgttgatcatcagtagccgctgaaatttggatttaattcatgcggcatattgcacttggatctttcttaaaatatgtacacaattctgttgctttgatgcttagaatctgcacacaatgccagaatcctttgtataatgtcattttccacttgcgcctgatatcaccagaaagtttcgctaaggtcttaagcttttgcatcattgtggaatttaacaaatgtgcatgatttcgttctctttgtagttggattcagggtatcgtccaagggttttagcttaaagagtccacagatcgttcttacatgcgattcttgtcattaggttcatgatttgagaaaatctgatagcataagctatgtactggcaacgcaaagccaaatgagacacattgtcttctatattttttctaatgaaataagttcaacttcaaataattaaacagctgtattcctgaattgctgtggaagactaaccatttctgtttcacagatgtatgtaattaatccagtgttgtcgttgcaagcatgagctctcgtggaggattttatatgctttacatgtttagtcatgcagtcaagcctaactgaagcgttcatggatctgacatacttttggtttctccctcgtaggcattcatggatctatatgaagcaagtgcagagtttgacaaatttctagaagcttgtaatactgtgaggcaaatcacgcagacctctggtgatatgaagaattttgcatcctgcacagagagattggcctccacatatgtcaaaactgggcgtcacgaagaagcactaggtgtctgggaggagttgttgaaagcagacaaagttgtgacacctgatacacagttaagggcgctttgtggtgttattgatgcacaagcttcattgtttgatttggcaacgcagcagaaaagagaaaaggattctgctactcttttaggggttcacactgtggaatccttacgggatggcttggagacaaacctccatattgcactccagaagcccggtttgcatgttgagcgctataatgcactgctactggacctccttcttcgaacaacgagagaatctagaggttgttaccatccctgaaatccacaaaatcttggaatgttactgtgtttctgatttttttttttttttttttttttttttttttttgcgcgtttattgtcattattttgagtcgtggatgatgcaacctgcaccatggtttttagcaggtctgtcttttcaaacttcaaactagttggtgcactgagtcgatgttattgatagttttttacaagtacgacgtatgtgctagttgaatttagataatcagttattgtaaacctagcttctttactattgcactacgcgcagggaaagattctcaacttcgacttctacagcaggctattgcgacaaccttatcatccaacgttcttactggttacgaagtggctcttgtcctctgtgaggaagaccatgctgactttttattccaaaacgtaaatagtacggaaagtacgaagaatggagtgccttactttagattaagacttggattgcggtttgcgcatctttatccatctcatgggcttgcccttgctacaatcgcatccttgtcacaaagcaggtctgagtcctcatgttctaagtttttattctattggtttgcagtttcaggtttctagtagttaatttttcgtgggtctagtgcataacgaagttataaagcgttttagtattattggggtaatcactggttttttggctgttcaaatagacatggaacaccaccctaaaaactgattgtttcattttacagtgcggatcgcaagaaggtcttgtgtgagaaagcacttcgagctgatgacacatgtttgatcgggtgagtgcttgagcatgctatgaaggtgttttaaaggagcttagttgacggtgttttttttgtgagggattacgtttcccaatgacaataatgttgatgataatattgcagatggcagttattagctgatctgcaaattgcagaaggtgcatatagtggtgctgcggacagtataaagcggggattcaaatcactcgagttatggagaacaaagtacgggttgcagctttttgctaaagagctgcgtctacatcttacagaggggcatttgcatttggaaacaaaagcctatgaagaagcagaaagggtgtatcgatttgtattagatgtgcgtttcttctatccaagtgcctcgaatattttattattttaaaagtattctagaacgtactcatgaaataagtaaataatacgcattcatggaaagcaataagtactcatcaaacctcatggatcatcagggtgcagacaaattgggtaacagagaagctgaaga

SEQ ID NO: 14890 - DNA, 389 bp, Physcomitrella patens
  Intron number 2 from transcript Pp1s190_85V6.1 (locus Pp1s 190_85V6) derived from phytozome v7.0 (chr-ID scaffold_190 ; pos 711599 to 711987 reverse strand)
tgaagttgtgtggagggccaagagtggtttgtctggtattctttggcttcgattccatcctctggattttcttaaatgtttcgtccttcaatttctcagcaagaacatcagcatccaatagcaccattgcaaatattttatttgttagattcgcattattaatttagtcgctgatgaagattttcgaagttcatcgatgatgttaggttccccggctagcataagttttgtgcaatctttacaattttggtctgtacaccggtgtttgcatgtgaatatcatccaacgcattttcttaattggtttgggttatctttcgcgtctgtttcatcttcagatgtttgtagatgcttaccccaaatagttctgttctttgctggcagggtcct

SEQ ID NO: 14891 - DNA, 2430 bp, Physcomitrella patens
  Intron number 2 from transcript Pp1s169_133V6.3 (locus Pp1 s169_133V6) derived from phytozome v7.0 (chr-ID scaffold_1 69; pos 730806 to 733235)
cgggcaagagactgtagcccggtttaggtgaatgccctaacccgtttgcgcctggttttctctttagcttgcacttttcaatgtagtatgtaggttcttctttgaactgtcggaattgtcctgattgatatctgtagattgtcttcttttgagtttcttcgtttgacctaaatgtgtagaagagtttcactttagctgagatcgcttgagtctgccttgattggtggccacgaacgttatgaaccccttacaattgggcgttttttgtacgctgttgtcatagggtttaattgatctgactttaatttgctaagtttcatacatacaaacttttctgtagaacatcgtattacgaggagtatgtaagttagttgagtgcaattcatgcataccctcgagaacattgttgtttgtttaagtgtttctgatgaatggtggttacgaaatttcttttcaaggttgcaatttctgtttaaaattctttgcaagtaaagtcgtgtttagattaattgtttcgtaatagttgggttatgtgtagggagcaacgacgtatatagcattatcatttttggtccagtctcttatcttaccagtttattgtcctaatctacatggtaatcagatggaaagtagctactctaatttacaatgcgaggacgatttgatgatagggttagaccaatgcatggaatatgttgagtagatgaatcgtataagataagcaccgggcttatataggccatactttggcgggtgacggtatccgagggtcgtaaccgattaagaggttggctgaatgtagataatgtaattgacattaattgatctattggtcatcaacaaagcatgtgagggacccagattgctgttgtttgggctaaattagttgtctcatttaggttttgctcatttctctgctgcaattatttgtttaggggattagagatgtgaggaagtattgcagagaagggtattagtgcgacgctgcgagtttttaaaatttggcggttgttcagaattgcttccgctatcaactgcctcgacctgttgtgctatctatttcgctttgtttgttcgttgatattctgagaatgttttgcggcagctacgtttttatttccagttgccccgaaccgaatgtaggcggatatacaatccttttttttttttttttttttttttttttttttcatctcttctcggcattgatgattctgctatttaaagtgaagctgcaaattttcaactgatttaagattcactgcgttgtgttatcaaagttgaattccgacttggtttcagaactatatcagcaaggaaaatcgtttagtttggaccattttccgactaacttagcagaatagacctaaatatgttacattcaaaccgaaagtggcattaactatttcctcgcagctcgcaactcttcagcctaagccccccaaaccgcctatcttaataaaatccaaaagacttgtagtgggtcagaattttgaactttcacattgctcatgaatattcataaaacaagcaagtaactacccgttttttcgtgaagtgtttcaagagataaggctcatttttaacagttctctgcaataatgtttgaagttgagctaattttcatttgctttatttcgttcttatgaattttattttggtcaatttcaaattagttattgatttaaaggtctagtattgacgaacacatcaggcgtttaaccaattgaaaattctcaacagatggactcaaggtttagcttaggattggggttgtgacgatgagtgatcttgagaattggatgaaattcatgtacattgtttgacaagaagtagctaccacctcacccatatgttatgtcactcctataattaaattggaagggagcttccagcttaaatatgattcaattagatttaaacagattctctggtttacacctatcagtttcttgagtatctctcgcaagggtgcgttgccccatctcggtctacgtttgatgtataagtaatggggtttatcgttttggacaaagtaatcagaacaggtttgtggatctatgtggcctttctttttctctcatcttcgtgatgtagaaatagataggtgagatatagtatcatgtcttaagggagatggtttgcatgtcatctttccatttaagaggtatagagtagcttgagtgtgtagaatcaggcgcagagggcatgtaatggtttctgcacgctactatgatacgttacgtagcactaattattaagaatttgaaaaaactggcctcggataaattttgtcccggaatgtcatgttttaaacgtgtggtgttgactaaaagctttgtgcagctgttttaacgttgatattaatatactgtgttgaatttcctgagtgcaggattacgagcagtaactttgatcgaggctacaact

SEQ ID NO: 14892 - DNA, 1288 bp, Physcomitrella patens
  Intron number 1 from transcript Pp1s336_34V6.2 (locus Pp1s 336_34V6) derived from phytozome v7.0 (chr-ID scaffold_336 ; pos 124777 to 126064)
atctcttctctgttgctcgtgtgtgtttttttcgggtaagctgagcgttaactgttgttgggtgtgtttcgaattgggacgattttgggtggtcttcaattcttcttctgtgtttttttctcttcgcgcagggccatgtctcgagaccgtggcacttgtgtctttgtttcgttggttttttctttgtgtgtatcaattgaattggtaggtggtggtttacatccacgaatgcaagtgcacgctgtaattggccaacaaaaagctgtaattgagcaatcgatgttcatgcttaccctggatgctgcgcaatactgggtgatgtagacctagcgtagagatagttggtcgatttttccatttctgtcagatgtagggcgctattcaaaatttatcaccctgtttgagtagtaccatatcgccgcggcattttgagtttggagcggcgcttgattcaattttaatttaacccttgagttgtgagctatgaggcgtgtctcgtaatttatcgtgcagttcgtgcagcgtggtttttgaaatcccacatccgacggttttcttcgtttaggcgggggactatcattgaactttttaattgttatggattgttttgcaacttacggcaatgtaggggttggatttggcagatgatctttcctccctctgtctctctgtctgattctctcttcctcatacacaatgctaacaaattaaaatcctgtttatttgtagtttgtggatagggatggttaaaaagtgaagaattttcatcaaattagacttcgaacccagccagtttttatccgggcctttactatgttctttctcaggaaatcataaaactgagtgaaggtgagatatgagtttgaagactatgacatcgtagatgatacgaagctgaatgtatttagtcgttgttggtgtcgaatcacaacagatgggaaatggacagttttcaatatgtttttttagagtggaatcttgtcgtgctattgttgcatattgagtattggttgtatcagactagactggttacttgaccctatgtctgcactactagtgattgggctgagccgactcgggttagttgcatactcgttatggatcagcttctcacctccttgtttgcagttcaacaagatatttgtgtgccaactacgcaaactgctcgtactaattctcagtcttcttttattccctgtattatttcataaaatttgaaaataacgctgttccgctgaattttgctattggagtaggacaagtcttcagctctggatcctgaggacta

SEQ ID NO: 14893 - DNA, 3124 bp, Physcomitrella patens
  Intron number 3 from transcript Pp1s38_395V6.1 (locus Pp1s 38_395V6) derived from phytozome v7.0 (chr-ID scaffold_38; pos 2259370 to 2262493 reverse strand)
caaactacagtaaggtaagagacccagattccatttccaccaactggatctccaaaacctcattacaaaagacttggccaagttctttgtgcacaattacgcaccaaatgcaatcggtctaatcccctgcaccaccaccgccactaccgccaaaacaaatctggaggggtccaagtacagtgtaggagcatctttaagtactgtgcagaacaagtcctgagttatactggggcagttcacaggagcttttggactttggaagacgctgaagtttttgtaggtcgtcgaggttaggccttcctaccttctgagttgtgtccctctctaaaactcagatgggtgctgttaggtctttcttctgtagattctagttttctgtaggcagttttgcaagaccagcttggactctgtttctaataaattgatgtggtggaagggatttagtaaacagatcggcttgttgaaagcatgtcgggatgtagctcacctccacacttcttcagatttttcccgaatgtagtgatggtcgagctcgatgtgcttcgtcctttgatgcatgactgggtaactagtttgatactgctcaagttatcatagagtagtggtgtcggtcttggagtctgcacttggagttcctgtaacagacgacaaaaatatgtgatttttctttctgcctccgacagaatccaatattctgcttcggttgacgacagtcctaatgtggactgaattttgcttgtccaggctatgggtgaagacctagtttgtatagaatccctgaagttgatttccttttctatttcccccgcccagtctgcatctgtgaatactaggaggttgttatcatctgctgttgggtaaagtattccatagttcatagtccctttcagatatctcagattttttttgtggctgcgattaggtgatcctgttgtggattacccatgtatctcgagacacagctgatggcgtattttatatcccagcgacttatggttgcatagagcagtcccccaattaagctcctgtacatatgtggatcaactgctggagtgccagtctcctttcgaagcttgcctttcgggttcataggaactggtagggtgttgcagggcgtcatcccgaatttgtccaacagtttttgtatatatttcctttggtgaaagtaaacccacagttgtcgtaaatcaggtgactcgaatattttatgtgtcatctcccgttatgatcatctacgtagagtactaccacatgtactgtcacttttgatagagaaatatagatttgggtcttctttgcttttagttagtccctgtgattgaaggtacccatcaatcttgctgtaccaggctttgggggcctgccgcaacccatataatgctttttcaagtttacatacccttgctcttttcattctagaatcctggaggtactgtcatgtagacttcttcattgatttttctgtttagaaaagcagttttgacatctaggtgctgcagtttccactgttttcttgcagctaatgcgattatgcttcttatggttgactatctaacgacaagtgcgaatgtttctacaaaattgatcccttcttcttgttcgaatctgcgagctacaagccttgcctttagttcctcgacctgtccacttgatcccacttttgacttaaaaatcggtgtctttccgacatgtcaactaagtgccaggtctaatttcgagttattgagtccatctcttggtctatcgctatttcccatcctttgtgttgaattgcctgatcaaaggtttcgggttcaaattctgcggtttctactgtcagtaggtaattgtctctgaacctgctgtttggcctcctttcttgtgttgggtatcttcgttccctctgttggtttgatgtatgttccggagtcagcatgcaagtgttgaggacgtttttgatgtgagaggctgtcaccatcatcgtcattgtaacctgtgaattgatcagtggagctagagagtggaggtgcattgtccgatgagcattgagtggcaggaagttctatttgctcatcatttttggtttctctaggttcctaatttgggaatagggccagttcttctaattttccgtcttgaggattgatcttgacatagcctatttggctttcgtcgatgactacatcacggctaatgtacagtttgcgttttacaggatcaaaaactctatatgcttttgaatgctcatcgtagcctacgaagagacaccgcagtgttttgctatccagttttgatctgctttctcgtggtatgtgtaggtatgctatgactccaaagatttttaggttgtctaccccgggctttgttttagtgaatctttgttcaggtgtaatgccatggttagctcttgtaggactaatgtttacaagatggttggctgtatttataacttccgtctagagaaacctaggcagtttacaagcagccgacattgatctagctctctcaaccaaggttctattttatctttcactcgctccattttgctgaggtgtcctagctattgttatttgccttgctattccatggtttgtcaagaagttgctgaattcatgagataggtattcccctctcctgtctgcgtaacattagtattttcttgcctgttccggattctacccttgatttaaattctctaaatttcccgaatgtttcactttcattcttcatgaagtaaacaaagcttttcctggagaagtcgtctgtaaagacaacaatgtatcttgatccaactaatgagggagttcgaataggtccaacaaggttagagtgaatgagttgtaatacatgtgtgctcatgtgtggtgatgtttttgggaagcgccctctgtgttgacgtccagctaggtagtctccacagatcttcttcgtatatccaagtatgggtaggccaatgactcttgctgctctcgaaaggtgctgaagtcttgcgtaatgaagatgtccatatctgttgtgtcagagatgtatgtcaccgttgaatgatctgtcagcttctagtgatttgtttgtaaacctgtagagaccatttgataaatcccgttttcctatggctaatattgtctgttctttgtgattgttcaga

SEQ ID NO: 14894 - DNA, 318 bp, Physcomitrella patens
  Intron number 7 from transcript Pp1s169_81V6.1 (locus Pp1s 169_81V6) derived from phytozome v7.0 (chr-ID scaffold_169 ; pos 442083 to 442400)
tatcagaagaaactgcttgagattattgacgaaaggtggtggtcctcagctgtttcaatgtcctttgtagttttgcatgattagaagttaaatataaccattataatattctctgatttggatcttgtacctttgaagtattctggtgatttaaattttatttggtggaggcatgtaactgtagacttgaattactcgtctttgtgcagtagaccactttgacttgtcgcatgaacttttattttgttttattttatgacttaacattgcctggttggaacagtaatttgccagattttcttggtggatcttgcaaat

SEQ ID NO: 14895 - DNA, 2679 bp, Physcomitrella patens
  Intron number 1 from transcript Pp1s169_133V6.1 (locus Pp1 s169_133V6) derived from phytozome v7.0 (chr-ID scaffold_1 69; pos 730557 to 733235)
aggaaggacctagcggatttgcttgttgtcactgggttcgtaatcaggcaattttgccttctatcccgaaaaccgccactaattttgacttatctttcctcctctttgttgattcgacagcattgtaaggcagggctgtagaccgtattgtttcattcttatcttccgaatttcagagcggttctgattttcgttgccaatttcttgtgtactttcagtcgaagctggattgttgcgttgaatagtatgcgggcaagagactgtagcccggtttaggtgaatgccctaacccgtttgcgcctggttttctctttagcttgcacttttcaatgtagtatgtaggttcttctttgaactgtcggaattgtcctgattgatatctgtagattgtcttcttttgagtttcttcgtttgacctaaatgtgtagaagagtttcactttagctgagatcgcttgagtctgccttgattggtggccacgaacgttatgaaccccttacaattgggcgttttttgtacgctgttgtcatagggtttaattgatctgactttaatttgctaagtttcatacatacaaacttttctgtagaacatcgtattacgaggagtatgtaagttagttgagtgcaattcatgcataccctcgagaacattgttgtttgtttaagtgtttctgatgaatggtggttacgaaatttcttttcaaggttgcaatttctgtttaaaattctttgcaagtaaagtcgtgtttagattaattgtttcgtaatagttgggttatgtgtagggagcaacgacgtatatagcattatcatttttggtccagtctcttatcttaccagtttattgtcctaatctacatggtaatcagatggaaagtagctactctaatttacaatgcgaggacgatttgatgatagggttagaccaatgcatggaatatgttgagtagatgaatcgtataagataagcaccgggcttatataggccatactttggcgggtgacggtatccgagggtcgtaaccgattaagaggttggctgaatgtagataatgtaattgacattaattgatctattggtcatcaacaaagcatgtgagggacccagattgctgttgtttgggctaaattagttgtctcatttaggttttgctcatttctctgctgcaattatttgtttaggggattagagatgtgaggaagtattgcagagaagggtattagtgcgacgctgcgagtttttaaaatttggcggttgttcagaattgcttccgctatcaactgcctcgacctgttgtgctatctatttcgctttgtttgttcgttgatattctgagaatgttttgcggcagctacgtttttatttccagttgccccgaaccgaatgtaggcggatatacaatccttttttttttttttttttttttttttttttttcatctcttctcggcattgatgattctgctatttaaagtgaagctgcaaattttcaactgatttaagattcactgcgttgtgttatcaaagttgaattccgacttggtttcagaactatatcagcaaggaaaatcgtttagtttggaccattttccgactaacttagcagaatagacctaaatatgttacattcaaaccgaaagtggcattaactatttcctcgcagctcgcaactcttcagcctaagccccccaaaccgcctatcttaataaaatccaaaagacttgtagtgggtcagaattttgaactttcacattgctcatgaatattcataaaacaagcaagtaactacccgttttttcgtgaagtgtttcaagagataaggctcatttttaacagttctctgcaataatgtttgaagttgagctaattttcatttgctttatttcgttcttatgaattttattttggtcaatttcaaattagttattgatttaaaggtctagtattgacgaacacatcaggcgtttaaccaattgaaaattctcaacagatggactcaaggtttagcttaggattggggttgtgacgatgagtgatcttgagaattggatgaaattcatgtacattgtttgacaagaagtagctaccacctcacccatatgttatgtcactcctataattaaattggaagggagcttccagcttaaatatgattcaattagatttaaacagattctctggtttacacctatcagtttcttgagtatctctcgcaagggtgcgttgccccatctcggtctacgtttgatgtataagtaatggggtttatcgttttggacaaagtaatcagaacaggtttgtggatctatgtggcctttctttttctctcatcttcgtgatgtagaaatagataggtgagatatagtatcatgtcttaagggagatggtttgcatgtcatctttccatttaagaggtatagagtagcttgagtgtgtagaatcaggcgcagagggcatgtaatggtttctgcacgctactatgatacgttacgtagcactaattattaagaatttgaaaaaactggcctcggataaattttgtcccggaatgtcatgttttaaacgtgtggtgttgactaaaagctttgtgcagctgttttaacgttgatattaatatactgtgttgaatttcctgagtgcaggattacgagcagtaactttgatcgaggctacaact

SEQ ID NO: 14896 - DNA, 147 bp, Physcomitrella patens
  Intron number 5 from transcript Pp1s128_94V6.1 (locus Pp1s 128_94V6) derived from phytozome v7.0 (chr-ID scaffold_128 ; pos 631266 to 631412 reverse strand)
ccggagctcggaaccataaaatccattcagctcctgtgagttactcaaagtcattgtgatactacgaatctccaattgaagcatccacagaatcactgctgttctcgtgatgttgatttgtgtttggggactggtgcagacttctga

SEQ ID NO: 14897 - DNA, 489 bp, Physcomitrella patens
  Intron number 4 from transcript Pp1s334_25V6.1 (locus Pp1s 334_25V6) derived from phytozome v7.0 (chr-ID scaffold_334 ; pos 129862 to 130350 reverse strand)
gcgaagttctatttttccggtacatccagctccttcactcagtacttgattacggtaccttggatacatccttcatacaacactgacatgttttcagctttgagcaatcgtaagaaatgacaaaaagcccgagtaataatattattaagattgagagattggattattatcaagaactggcatttttgtagctttaaccttgaagaatagcagtttgtgcatgccaaatgtatagcaacctcgacctcggagttttggacttaatagttaactaccataggagattgcacttgggctagtccggcacttgcttcggatcaattccgcattttcgttgcactcttatttatatcgtggaatactttagaatcttgtgtattattgctgatcatgtttagtacgggtggtatagatgatctcggcttttgggctcactgtttgtctctttcagaactgactttggaggtttgcaggccttcagggtttctt

SEQ ID NO: 14898 - DNA, 715 bp, Physcomitrella patens
  Intron number 1 from transcript Pp1s54_81V6.1 (locus Pp1s5 4_81V6) derived from phytozome v7.0 (chr-ID scaffold_54; p os 538233 to 538947 reverse strand)
tatcatctgcaaggttataacggctgtttcacctggtttgtgtctcttcaaccgtgaagatctttcttgctactccttgctagatactttgcatgttcgttgtgtaagattgaatgccatggcagaatgatagacgtcgtggttcggagtgtcttagtgttgtccacttgtcaattgctacaagttcgtcttagagattgttgcatgtgcttctgagcgtgtatgaaggaagagtgagaagttgcattagtattttcaccaaaagttcccattgtgatacgaagaattgatggtctgccttgctgtggcttttatctaagaaactgcaaaatcaagataactacgcatactgtctcttgactaattatgtttgtccctggaaagcctaggctgtatttatctcataattgtgtgctacttttttccactggactctggtttctatgtctagaaaaagtcaattttgctactgtacatttttattgcttaaggtatgctttagtgaagtttcgatgtgcagattaagttggtccttatagaaagaaaagttcttgatcatacgccagaactctgtagttgagaatgctcattccacttttttcaaaataaggctcctgtagcgaattctccttcgttgttgtgaatcttcatggtgacctatcctaacgattctttcctattgatggttcctcgcaattcaggacctgggatcatc

SEQ ID NO: 14899 - DNA, 1606 bp, Physcomitrella patens
  Intron number 1 from transcript Pp1s367_18V6.1 (locus Pp1s 367_18V6) derived from phytozome v7.0 (chr-ID scaffold_367 ; pos 179922 to 181527 reverse strand)
gttgcggaggcttctccgcgagcttcatacaagaggtacacttccgaccacaatacaagttgttaatcaaagtgctataaagttatcccacaattcagtgtttcacaacaaaactaaccactttgagaccaactggcacttcaccaggcagaaaatagactcatgagaaattaaggtagattacatcaacacaaaagaacaacccgaagacatgctcacaaagcttctacgaagaacgaactttaaaattggtagaaatagattaaacctttcaagcttagaaagtatcacattggaagcatagctctgggcctaaattaaacttctctacttaaacctacaaaaacgctttgcttcctctttagttctgaaatctctatgcactgctcccttgaaaccaataacatttcttgcacactcttcccacaaagagttgacccccaactgaacccctactctaactgcattatacttcattaccagccaaccctgtcgatccttcctcttgagttcatcctctgtttttacttgaggctgcatcaccaaatctcttagctgcgaagacacagcatttcccagacaacgccgaccctgccccaattcttcctcacattgcagagctgcagaggatacacattctacccgatcactccctctttccactgcagccaaaatgtaacatttgaatactctaaccacccaactgattgattgtttcaagaaaaccaagaaagcccagaccatcagcaacacagcttgacctggagagatctcaatgaggtatcaagggccatccattgcaaaaagtaccaagcatcgaacaaaagggggtgttgtagcccaatgttcgatccatgttggcatttactattctgttcgttaggtttacatcttagcttagtactcttaaactaatgtttgcagattagtacttaatcctttgctcctgacttttctctttgaacagttaggttccacacagcgggttttgtgaatacaattttcattttaatagattttgttctgcaagtttttacaaatccttgttcccttagtgctccatggctcggctatcgattacttcttgccgtcttttttcgtatcgcggagagaagagccaatgacacttcctagttttttctatctctccctttttctttttcttttttttttttttttttctctctctctctctctctctctcttacttctagttcctgcggcgtgcagtggtgttgtttttgcggcattctttgtttttttgtctctttgtattactgctcctgatcgggattgttggctgagacggtagattaacgattttgtttggttttttcccctagttattgtggtggatccgtggtggtgccaacgacttccggtttcttctttttcttgctactctttgattggagcaacggccagtttttgttctggagttggaccagctagtgtcaattgctccttgtgtcttcccctcaagcggattctaattgagtcgtcgtcaagtggagctgctgtcgacaacatcggttattgatttcttcttgccgtctttgtttcctccctagttctttgtgctgccgatcatccttaaaagagaagc

SEQ ID NO: 14900 - DNA, 2939 bp, Physcomitrella patens
  Intron number 3 from transcript Pp1s27_323V6.1 (locus Pp1s 27_323V6) derived from phytozome v7.0 (chr-ID scaffold_27; pos 2243881 to 2246819 reverse strand)
ttcaattctcttggcaggtgaatttcgctttctcgtggtgaaattctacttctcaaccttcgaatttttataatgtcttgctttataatgtcttgcaaagatatattttttttcaactgactgagagtgtgtgtagtgccatgcaattgttggtagctttccaggtggtgatatctactttaagaactttatttttgtgaattcaatatgactgcgtactactgaatttaggtagtttatgggattacaatttaataactcatatattcattctacatggcccttcaaatcaagtcggatatttgaataattttactcacggaacggaagcctcccaatggatctagtggctttctaagctgtgcaagtaatatagattcagcaccttaaaggtttcttacgttgctctcggatggtttcgacaggtagtgttattggagggttggatgctagggtttgaacctcaaaatgaatctgaagttattgccgttgatccacaggtatcccaggtgtggcgaagctgagatcaagtaacatgtcattttcgactttgtgacaacctcatgttcttttactatctttaccctgttgtttcccttcacttatacaacactccgtattatggtgtttaggtgaccgattttgtttcaagatatatgtctgcctgcaaggcctacttggccgtccggtatgcgcaggggcctcagggctcaaaagaagagcatttgttgatgcttaacgttaacgagaatcgtatcccaatcggctgatacactgctcttcacgccaatctagatggctcgtttattgcagttcaggctccggaaagcaaaaaaatggggcaggggagaaagtagttcaagtggatcactggccagagtcagcagcattagcaagtggtttagcaaatcaagaacacattcgtttgcagaatgttctgcacatgtgggctactaataaattgattgggtttcccatgtttacttctgaaggtgagggaggatttcagctactacagttcatagaacacaaccagtcacactagtaatggctcgttgagttcttccttgtgtcttaggcgactttcaatgactctccaataagtgtgtataggaagttggaacgtcgaatacagatgcaaatacatattgcgtagtattagatggttacaaggagctaaagagagtgcttctggaagagtattgaacttacaactgtgttacttcaaaagccccgcagcatgggcaacatcatgatacagtcgtatccacaatggaaaagcggttcggacggcctccaaagcaggcttgttgtagagagccaacatggaaacgttatgattcactacattcgaaaccagatggttatcacctactaaatctacagactcctctacaatcttcgctgcatattgaaagcaggtcgacaaggttttattgatatcttgcaagagggtagtcatcacctgaaagtcatttttgattcggtccacatgttgttgcttttctctattgagaaggcgaggaatgagttgactggcaagagggaatgcgccgcggtcagcataagccttcaagtctcgggatgtctgagcgctggcagcatcgatttgctgtatcagacctcgcacattgcctaccctgcctttcatctggatgaatctccctgccattaagagtgtttgctccacatcgcgaagcggacatatcacttccccagaggtcgactcttgtgtgctcgaattaagcgttatgtgggcagctctcaatacgtcaacggtgaactgggtcacataagatctgcataccttgccggaggatgcagaacctagaggtaacggaaacataggaacggggcagcacagagggtatgcattagaagtacgtaaatctgctttaagagtatgtgggcaatgaagctccagaatttgagtgcaggaacgcataagttcagcttcatcgatatttgaagacgaccttccaggtcctacgcccatctgaccacactccgagcacgtcctctcgtgccgatgagtgggagcctcttctgatccagttaaatctctgctgaggttatgatcagcaggatcaagaacatcgacttcatcgtcagtaccaaccttctgcacactagagcttggcagcttcactgactcatcgatattcatttgtggataacagtcgtgttcgttatacttctgattctgttcaaccaaaccattagcaaccggaactgttgagactgaggctttcccgccttcacgatgttgtaaaacctccgcactcggtggtgctatttcaatcaaaggagatttcgagatttccctcattgaatctaacccagatcgaatgggtaacaagaaaggctcagttctggtggtgacgagttccttgtcaacaccaacttcttgctcaaccacactgtgagacgctaacaatactccattcatactattcgacgtcttgtcacctgcagccatgaacctcacttcccaaatatcagcctcatcccatggttggtcttagatcatcttcgcaattgaactaaaaaaaagtgtggtgattgctctgcatgctaggcttaccagtaagctccaaatcggctggcaaagttcctgacgattctccaagttttgcaggatcaagcttaaatggtatacacgtatttgaagtgagaccattagatgcagtcgccacagagtccgcattgcctgaatccacttgaacttgatgcaggattggatggatgaatccgcttaaattcttctcaactttatctattaccgtcagccttggggacagtcgcctgcttcgcaataattcgttggtatacaagtgaaaaagatgaacatcaataagcctctcgcatgctagaaatgaagacgaagaaccagacttgactgaatattttcagttgattgactacataacagcacttaa

SEQ ID NO: 14901 - DNA, 1291 bp, Physcomitrella patens
  Intron number 6 from transcript Pp1s131_96V6.1 (locus Pp1s 131_96V6) derived from phytozome v7.0 (chr-ID scaffold_131 ; pos 407037 to 408327 reverse strand)
cctggattcccccctccaccgaggtcatttttcacgcacatagcctacttccacttgtagttatctcccaatagttgctaaggcactcaagtgtgttctagccactgtagcaagctcgcgatgtcagctgactgctgtttgtatagtcaaggtaaagagttcttttgtttgacggttgttccttgcactagtgtaatttcaagtcttgcttggtcataatccgctcttatatgtctggatgctggttggtggggcggtcctcatttcaggagttcgcatttcttcattacatcctgaggagaagtagtgggcctagctgaagtattaaaatgattttgttttgctctaatcagcacttacctatctcgatgaggtagccttgtaataagcatgattattgactttatgagagcgtggttgatcggaggataagttctagtcagcaagctgtcgttaggattgctgcatgagcagcatattgtaacattttcaattttgagattgaagaagtctggcgtgatcttgagtgatctgtgaattcttgcgcatggatgcagatgtgcaaggattgacaagtaatgaattgggtattttttgcacccgttagaatcttgaaaaaagtaggcaatccgttcgaaacttcgaaagtttatgaaagttttttgtagtctaaattggtagcacctcttttggctgctcagggtcgtcagcacaaaccattggcacaggactgacgccttaattagtgggtgagtaacatagtgcgatgcccaggttcttctggatgagaacatgagctttcatcctctcctcatttcagaattttagggtgtgttacagtgtggtcggaggcagttgcttgtgcattttaagtcacaatcttcctcatgacttcaacattggtttcattatagtgcagaattctgttgaatcaaagttcatgagacgcaaatttttaggatttgtagtactggtttaggagtggcaggttccaggtccttagtcgcaagctgttacgttattccttatataaatcttggaacagccgctggatctatcagtagtactaccatgagtatgtaagatcgaatgttgacttttactactttgatatcaatgacgtatgacctgtgaagtatcacaggagtcgctacatgttcactctttggaaatattgaggcctttagattttggaactcaagttacccttttctcattcgttttagtagcttgtgaggtcttagttggttccttatgaatttatggtggattgaggggttgcagcggtggc

SEQ ID NO: 14902 - DNA, 1116 bp, Physcomitrella patens
  Intron number 1 from transcript Pp1s184_15V6.1 (locus Pp1s 184_15V6) derived from phytozome v7.0 (chr-ID scaffold_184 ; pos 66842 to 67957 reverse strand)
tcttcgccttacttccctgcttatttgcacatcaggtattcatatcttttgcttttgttttgttttgttttttgttttttgtttgtttttttttttcttctgttttttgctgtggggctttcagggttttggatcgtggtattgttgaggaattatacagttactttctaagaatgtgaaaattatgtgcgccttggggtgttgcggatgccgatttgtgttgaagttgtcacgattttttttcatattggtctagtacagaatgaaaaggcctgtctgttgatttatttattttttgattatttatttttttcctcttttaatcttagaacgggcgacataggctgttgcgcatttgggatctggaaattttggctgataagtagttttcttgggatttgttggcggtgtttgcagttggaaaatggtggagacggaggtggtgttgtcttcagggatttggacgttacttggggccgtaataaagtatgtctagctcttacctgtccctagggattgtaatttatagcatttgtatagcgtcatgtttattggtgttttttggttcaggtttgagcatttgaatcaggtttgtagtttttactctttggaacgagtcgtcgagatttcaacctttgagtagtgatcttaggtggttgtggcaagttcctcaccaggtctccattcagtctgaaaatttaaaaattctgctaattcctttcttataaaacccagtccacccggccttcggttgggaggtgtaattatttatgcagccgagaataatgcataagctgggtggtgaatttcatcttattcgacgcaggcaagctcttaatggtttttcaagagccctaacaattatcgaatctagttttctgtagggttgtggaattatgtagtctgatgcttgttgaaatctgtgtttgatactgagatcgttcgaagaaagctcttaaattgtttcgttggagtagattggtcgaaaataataaaatggtagcatgccatatctgaaatagaaacctaaatgggcgcgatgtgcgaatgaagttgattttcgagaaatgcttaagggtactcaatcggcctgtgtgttggtgtgtgcagttatta

SEQ ID NO: 14903 - DNA, 1404 bp, Physcomitrella patens
  Intron number 1 from transcript Pp1s51_109V6.1 (locus Pp1s 51_109V6) derived from phytozome v7.0 (chr-ID scaffold_51; pos 789178 to 790581)
ctgtagttcgcaggctcctcgtggcgtgtaactaggtacgatcgcccaccatgttgtatatcatgcggaatttcaaatgtgggcggagtttaaaatactcgcgaagctgcatgccctcgaacccttgaaagcatttctgcgcactacggttcgtgggtcgtaaccgtaggaatccaattccttggcactcgcgtcctcgctgccctggagattatatcagacttgactggcggttgaattgtgaattgttagagtggaggggttttgcaaattcggcattcattgatgattccgggaggaattcgaagtgtgtggtgaatttgttgttcttccttgtgtacatgagagtgttacttgtgtgtggttttggtaggaagattttgtcctctcatgatttttgagtttttgttgaggcagagtttcttgatctttcgggaattagggttcaggggattcgagattacagtagcgagagccattgttgccatctctccttttacctcctggtttctttggtcttcttgctgatgggcgtgagagcaaatcaatttttcgagaccatatcgtgaaaggaatctcatagtcttgctgcttgagaatcagttcgttacaataattgttgttcacagagcatattgaacaattcaccacagcgacgctcagtagttttgtgctttcttgcatctcgttttgaattcttgcccaagctcttcgaaccactcatgagaaatcctttttaatgattttgtggagtgatgacgagcagagatgcttgaagtgtttctcttctatgacctccagtctggacctgtgggattagaagcttcgcgattgaaatcaccgtttacgtagagcttgtagtgtcatcgctggcccaagttcacacttcctctcacgctcgctgctctgtagtgaacagcaacgagatccgcatattggtatcgtcgacatcgttagtgtcaattccgaacttactagcgcatccgttaactgctactgttactagtcgatatttttaattaggggtgtgtgtcctagttctcgaaagttttgaaatgggtaagttgtaaaataaaacagcacgctagctcgtccttgctacttaaagtaacccagccttattgaagctgtgctaacgctgtatatggatgttcgacttcgtagaactttcatgctcaagggagttttacgagagtgtttggttcactgtgaccttttttagtcccacttgttttacatcttgctggctggctatgtaacggcgttgttactgctggatgttgtacctgtgtatggagggtaatgcaatacaagttggcatttcgggctttgagggacacatcttcagaattcttcgtttaaatttttgaaatcttgcaactgcaggggtagctgtggggctgg

SEQ ID NO: 14904 - DNA, 1385 bp, Physcomitrella patens
  Intron number 1 from transcript Pp1s331_35V6.1 (locus Pp1s 331_35V6) derived from phytozome v7.0 (chr-ID scaffold_331 ; pos 355219 to 356603 reverse strand)
tgctgccgtgtcttgtcgaataaatcagccctacagtaagctatttcaattttcttcgtattaaatttgatatattaatcttttgataggctgagtcaaagcctttcatgcaataagctctgttcatcttgttgtaattttgaaatagcttactttatgcatcattcttttgagaattggaggaaatatttttctcaaattctacttctctgcttacttttcatgggatttgttaatagaaatattggtccgttggcttgtacacgtaaacattccatgcgtaggtgctctgggcgatgattgtcaggcacagtgttgtgaatgataataccgacactgatccttagccgaatcccctcagtacatcgtcaggattaaactgaataaaagattgatcgcttacttcaaaatcgaacagttgaaattggtagaatagaaacgacaacctgccgatataataagagatgacgtggttggctgcaatctgcttgggaaatggctcaataatttaaattactattgccataagaattctttcactctggttatttattagggaattatgatttgaaaatttcatccaatttataatcatttttcaatgcttgtttcctacatatctaacgtgattttatcaatacttcctttgtctgttcattctgccttactgcaaattcaagggataagaacgcagtaccacgtcttcagcacacaatagtagtatttttgcgccacgtgatctttctttcctcctcctacctgtgactaagtccttgaagtgttgtgcaatttctttaaaaacttttggcggacctgatgcaatttcaagttggttaaccaagcaaaccgatgataccgcaaaaaatggtttggtctgagtattaggatgtgtagattatgatattcgagcgaatgcgtctgtgctgtgacagagattgatttgtcgagttcatgcacatttggatgtcgatgccgaactatcaattgtaaacatcgagattgggttgctctttttagtcggattgtaaggcatgtgactcttgtgattggaaggactttgtttctaccttgtttctgttctttttaaaagcttttgaggtaggctcatctatattcacatcagcttgtctgtaatgctatcgatgcaagaaatctaggacatcgagatgaatgcaaattgtgcgtttcagatatgaatgaatagaaataccccctgtttggagctgcttctgaatgttctggctggtgcctgtggactgagctattacgttgtcaccagttcaagggtaatatactggagtgctatggttacatttatcttgagctactcattttcctttactttggtggaccactgcagtgaagagcggaggaatccttgttaa

SEQ ID NO: 14905 - DNA, 602 bp, Physcomitrella patens
  Intron number 1 from transcript Pp1s76_105V6.1 (locus Pp1s 76_105V6) derived from phytozome v7.0 (chr-ID scaffold_76; pos 684066 to 684667 reverse strand)
ccagccgggtaagactaagtctcctacatgacttctttcgattaggatttttgccggtttctatttacctactgaatgtatccagagtctattgctattatttttgctgagggaattgtactcttgattgtgtggatgttctaagttctgtctcctagcaatttgagaacagtgttagactagtgtattattaaattttagtttcttgagaattggaaaattcagtgctcgaattgctgtatagtttgtgatgatgtcgattccgtgtgtttaaaccgtgtctatgcttgggtaacctgatgatcatgcttgatcgatagtcgctaaaaatgacctctgcacgcttgcgataatttttcttctaacttctgtagtttctgattttcctggtgttgagagtctcgttttgtttgttatttatctttcatttcagactactcgacagaacctggattccatgtttgttttgcatgatcttgagatttgagaatcttgtgtcgagatccaatcagaatgttttattaattaatgagctttggcaaacattcttctatgttggttttgcagagtgtactaggaatcattcttggtggtggagcagg

SEQ ID NO: 14906 - DNA, 589 bp, Physcomitrella patens
  Intron number 1 from transcript Pp1s294_26V6.1 (locus Pp1s 294_26V6) derived from phytozome v7.0 (chr-ID scaffold_294 ; pos 90190 to 90778 reverse strand)
acgctgctgtgcctgcacctttcacttgttgcacggtgggttcgtgtcactggccccgctgtgcagtttcgtatgttcagttagttctgttgttgttgttattgttgtttttgttttttatttttactttaatgttgctgtcctggagtttcggttgcagggtgcgtgttgtgttggagcgttgtatgttctgttcggctttgtcgtggctggctggaagccaatggtgacctaatggttttagtgagtagtattctctgaaatggagttttaagagacccagcatttttcataggttggtgagacgccccagtcttgagtcgtgagaatgagggaatgagcttttcgcggggatttgagctcagtggtctgtttgttgttgggtttggtagccctcgttgcatttctttgtgtatgatacatgaaatgcgtccacctgtagcctctatctttttcgactgagtgcgtcattttcggaatggaaaggtctgctgggagtccgtgtacattctttgctttgttcctgatttgaaggtttgttgttcttgtgacaggttgggtcggcaggcagattcgagctcttcgatct

SEQ ID NO: 14907 - DNA, 5051 bp, Physcomitrella patens
  Intron number 4 from transcript Pp1s10_341V6.1 (locus Pp1s 10_341V6) derived from phytozome v7.0 (chr-ID scaffold_10; pos 2691782 to 2696832)
ggaagatctttccatctagacgaccaagtctccaggtctgtaactggcctttcgatgtgattgttgcatattgtagatacaaaatgtgggttgagccgattcctcgttttggtggacatgcctcgcatcgagcgttgcctggtcgcaaagagcctttgccgaattagcaaatccctcgaagtggtatcgcatcaaacaaaaggcaagagtccaacgtctcattcattcaagataatgagctcaaccttcaagtccctgttgtgcttgcaagctctcacttatgggcattatccatggactgaagaaaatgcgttgcagattgttcttttggtggattggttctctattaatatctattttgacaaagaaattaaaaatctgaaacaagcaacaagacgcttgcactaaattctttaaaaagaaaagatttcaagaattatttgagatgctgttccaatgaggtggcaaatattaatagcattgatctggtaggagttcaatgactaagtggttttttcttggtggaaaatagtatttgataaagtattaacatttgggttttaaagcaaggagcatgaatagatataatagtcaaaggacttttgtaatgtatataagagtcattataatttgctccaatgtgggtgggatggaatttggttgtgggacaagactactacaagaattgttggtttagaagaagtcatgtctttaaattatccatattgagtggttgaattcagaagcatgttagccaactgtagttgatttttgttgcacctttgacattatttgtgaagagcattgaaagaagaagtgatagaagttgaatatgatttggatgatctatctttggcttgctttccatagcataggacattagataagatgttgtgtggaagatcaaatgttgtaatgtagatatatttaagtgaatctatacaaaatttattaaataaaaatacctaattggatagaatcttaaattttattattaaagatatcatgtgttttcaataattataaacaaatttggttatgaattgatgtagattataaatctaaatataaaattatttactattaaaaatatcttgatattaaaattaatatgcaacaaatatatctccaaatgaaaggattgaatttattgtagtgtatgtcatgaatcacttataaattttgagcatcttaaaggtcattttcaaataagcttagctaaatggtttcatagattttgccatcaaaattgataacaatgttgagcttacaagcatgaataattagacacatactatcttcatatacttgcatgttggtggcttttttagtggacaacacacttgatattaaaatttattgcataaatgtgtaaaaatttgaaaatgactactttagcatagaaatggattatcaagtattttgaaagtaagaagaatatgatgttataatatttgtcattgaaaataatagttgtatttatagatctcgtagtaatatgaggtattggtttataaaagatgttaaaggtcttttgattgagttaatggcattacaatttggtttccactagtaaaaatcaattttagacttatggctacaagtgtaagtgagtggatggcaattgcctttgctaagtacagttttgtgattagctattggtgtcacggccataatcatgtaagctaataattacatatagaaataggtagaagtaagtaaaagtagatagaaataagttaattctataatatttaatatagaagcttcctagaaactttctagacgctgctttgacttcataggtgtctttaattgactttttggattagaaacgtggtcaacaagttggccatgtgccacacatgttgttagcttgatgatcaagctaactatgtggcccacacgtagaaaaacttgccttgtaagtcaaggcatgtgtcctacaaagtcaacacatattggaggtcctatagaacgtcgccacgtagcccctatttagatagtatatatagagacaagagtgaaggcttcttcactcttgtcaactcctttcttgcttctagtccaggttcaaaagtctttagtttcttgtcttgtggcaatagccattccagtttccttttaatatacctacttgtttatattttgacttattatatcgagatagccttttggtgtatattttccctcatcgagtctttgtccttgacaattggtttggttgttgcaattagagttgtaggtgttataattaaaatataaagcttagtcatcaaattttaattttaaatattacattaattggttagaaaaaatatctaagttaatagtatgttttagtaatttttttaaaaaaacatagaatttatatagaatgagtctaaaatacaaactctaataattcaaatatgagtacatcaaaaatttggtaggttggaaggttctccttaagcttagctttgattcaaagaaggcttgtagatcactttgaattatcattggatttttatatttcttgttaaatgttaatttaacaagtactaattccaaaaaaaaatccaaaaaaagttaataagttgtagttggaattcatgttcaaaggaattttgtacgaattttgagtttaatttgcattccatacaattcattttttgtatagaataaaattttaacttttattaatcaaattaatcttgattctaaaaaaaatcatagaagaatatggcattctatgtatttccaaagtatttatcatctttgtattttagttttaatattaaaatattgttagacaaaattcaacttaaaagattaaaagattaatttgattattaaaagttgaattgtatgaattaaattttattaatcaatttttgtagaatacaattcaactttttttaaattattctaaatatataaatataaatataatcttttacataagaatactatttatatattttaaattagcttattattataaatattacaatagattgtatattgtattaatatttttcataattatgtttctccttaagttaaatttgactattaagtagaattacatgtgcaatttgatttaccaaattttaaaataataaaaaataatattgaaggttttaaattatttattaatctcatgtcaaaaaaataattttaaatttctcatttttaggtagataagtagaaaaaaattatagttcattcaattaaagtattagaagttagaagttaaaaaatatcatattagaagttgaattagacaactttttaagtgaaaaataaacataagtcattctatacttttaattggaaatatttatggtcttattattcatccaatagatattaagaaataaaattggttcttatagtataccttacatataaatttgtctctctaaaagatattaattttatttttattgtaatccaagcaattctattctatttgtataaaaaaaataaaaaataaaaataaaatctaagaaaaatacatgtaaactaattgcttcacaataaattgatcctgtatcaacatctacatttgaaactccaaaatatttaaaaattaaagatccaaaagcaaccattacatagcttgaatggtaattacttctaatagagaagaaaaaagattataacaataattataataataattttcacacatcatgctaatctcattgaaaaccttctcactacatttgttactttttttttcttttaatatcttactttcaacgccccaaaatatctataaattacaatgcaaaggatggaagaacctcgaaaggcatttggaaagacatggggacagagccctcttgggaaggtagagccgtggggggggggggggggtacgacgcaagtgcaagagagagccccaccaagctcgacggcttcgtgcgagatccctcctcggctatggcaacagcacaaaaaagagccagtccaacctgaaggattcctaaagctgcacataaaaatatcttgacactaatcttcggactctttaactcgctgatcgatgggctgagaggagctgagacaagccccctagtcctcacaacctctcatctaggattcttttagtgcatgggttggagtggaagtggggatgggggtggtggggtaaaaagggcactggcggtggtcctgatgacaccaccgacctttacccctgtcgaatggccaagcctgcatcaaaatattcgcccccacacccccataaaaccaaaactcgaaaaaaaaaatctgcttggtagcttctctctgggaaagttgcgaattaattgccactccgcaaccaaaaccagtccgtgtgctctacgacaaagcacactccctcggggttcggttagaatctttccctgcaatattcctaagcttccgcttggccctgaaggagaatgaacaggaatctgccccggtggtctttgtccctcagagctgatgccggcacaatctgagccattgcatagaaagcaggagaaaaacaattcatgacatgcgttccgacgtttgtgtttcagttgcaccagagctgcactgaagagttccgatccctgacgagtctttcgaaccagatgtgttcctagcgccagcccttccgtggtgggagtgatgcgaccgaagttggtgaaatgagaagtgacagtggtaatgtgggcattaaatggggtgaatgcattcgaatgtctgtctcaaagtagaatgaagcaatgaaggatgagggaattctatcacgtgaaatgtggttatcaactccacccgcggtcattctattttgaaactcttcattcaattcagctactcagcttcatgcacaaggattcccagttgttttgtctgacaccaagtaatcaatttcattgctagaacctgcgacactagaaatcaatgtaccattgttttgcacacaaagatgttattaaagggtaatattgaccgcactactaaacctaattgtgtaattaacaattagagtgttcaaaatatcatatattctggtcctattggttaatgcatttactcaagccttc

SEQ ID NO: 14908 - DNA, 2206 bp, Physcomitrella patens
  Intron number 1 from transcript Pp1s78_107V6.1 (locus Pp1s 78_107V6) derived from phytozome v7.0 (chr-ID scaffold_78; pos 605169 to 607374)
cgtgtttttctttgcattctaaaagagaatcggtaagtcgtgcacaacttgtaggaaacgatgttatggcctcaatcctgactgtaaattttcaacgattcgatcttgatccttcaaaatcctaggattgcaggttaccgacagcttggtgttttgttgaagagaaaatctgcaagtgggaatatgcactgccatggataatttgaatactgtgtgacacactcatgtaggttttcatgtaggtgttgcccatgcctatgttctgacgcattggcgaaccttttcagaggcaaagaaaaacacatattcataatgaagtccaagacgttctagggctctgtgctttgagtatcctacatttgttgcaagttgcaagttagtgccctggtgacgccattcattagttgtggacttctcataacccttccaataggctatgctttttacagaacagattcgcagaccactgtcagatttgcagagctttcgtaacactgaagagtaaagtcatgggagtcaatggacgaaaactaaagcagtgggatacgtcaccacagcttactgcaaatatctttgaaggctgttgcaaatactcattgcttgcttacgattttagaaaggtttcagttacatcaaattgaaaagatcggtcgttttcttctgacgtccctgcagaaagcctcttgtaaacaatcatgtttcgtagatgcctgtaacgatttggggggggggggtctcactgcggtaaagttgacaacagtcatgcagcagtttttcacatcatgaataagatgaactttgtgactccgagcttgattcctggctatttttacatgaacggcacctagatgtgcgtggttacctcaacaggaaactgtacagagtccctcagaatgtgcgctgttttcagctgcaataaagtctgaacatacattaaaagaaacctacccctgaggtttgcaagcacgtccatcttcatgcggtaacttgagtcgatttgttttcttcgattgggctgtgctgcaatgaatgccctaaatgtatccgtagatgcatctcggaggaacaagtggactgaaaaacagacaaccgcgtcactcactttcatctaaggtgaacgtaatgccccggcatttgtttttcctctacaagattcggtcaggaacctaaaagcagatggtgctttgattcctgcttcttctccaaaagcaaggcttcccagatgtcgtctgctttgtgttgctcgttgttctgtaagcaccgcatgttgtgcatacagagcccgcatttaatctctcaccgttactcataaactcgactcccaactacccatcacagagttcaatgcagagggctcttgctgactttgattgcactctttgccgtaccggaattgctttgggtcatgccgactttgttacctgaggggaattgcgaccgctacccgtgaattcaggcagtaggtggctccgttggagttccttcaagtgcggtgtatagtacgattccttccaacttcacggaattctagaacggataaaccagtgatacaagacaatgtttatttctgtgataaccgatggatgaagcattcgaaacgtagtcgcaatttatttgcatgagtcagatctttgtctgtgggttgaaaaagcgtctcagcttctcaattcaagccactatgcattcacaagctgagtttggcttttacccgggttttgactaagcaattatatggcgtgtacacatcaggcagctgagtgcatttcttaccaacaatgtcgatgaagatttcgagaagcgaccctggaggcgaactgcttgcgaatacctgtaaaccctagaaaacagcgcatgagagcatgcataaccttcacattgagcctgcattcccactccgacgctctcaaatctgaaatgtaggtagtggccaaacctgctagattcacacagcaactccattacccaaactatgtacgattcttcattacaaaagctccaattcaatcctgagaaacagttggtgtcacgattacgtggattccaaaaagcaacgtcagtgtgatttttttaaaaataaaaagtgaggtgggtcccctagaaattctgaaagagctgcaaaatacaacgtaaaaaacttattgtcttgctcattttcttccatatttcgcaagcaatcaagcgacaataccctcagtcgaagtcgagc

SEQ ID NO: 14909 - DNA, 665 bp, Physcomitrella patens
  Intron number 2 from transcript Pp1s184_15V6.2 (locus Pp1s 184_15V6) derived from phytozome v7.0 (chr-ID scaffold_184 ; pos 66842 to 67506 reverse strand)
tcagggatttggacgttacttggggccgtaataaagtatgtctagctcttacctgtccctagggattgtaatttatagcatttgtatagcgtcatgtttattggtgttttttggttcaggtttgagcatttgaatcaggtttgtagtttttactctttggaacgagtcgtcgagatttcaacctttgagtagtgatcttaggtggttgtggcaagttcctcaccaggtctccattcagtctgaaaatttaaaaattctgctaattcctttcttataaaacccagtccacccggccttcggttgggaggtgtaattatttatgcagccgagaataatgcataagctgggtggtgaatttcatcttattcgacgcaggcaagctcttaatggtttttcaagagccctaacaattatcgaatctagttttctgtagggttgtggaattatgtagtctgatgcttgttgaaatctgtgtttgatactgagatcgttcgaagaaagctcttaaattgtttcgttggagtagattggtcgaaaataataaaatggtagcatgccatatctgaaatagaaacctaaatgggcgcgatgtgcgaatgaagttgattttcgagaaatgcttaagggtactcaatcggcctgtgtgttggtgtgtgcagttatta

SEQ ID NO: 14910 - DNA, 1220 bp, Physcomitrella patens
  Intron number 1 from transcript Pp1s7_16V6.1 (locus Pp1s7_ 16V6) derived from phytozome v7.0 (chr-ID scaffold_7; pos 72678 to 73897)
gctcattccatcgggtgagtggattcatcacgcatgcaaggatcaccgttctcctctccccttcccatcgtctctacattcgctgtttgctgctttcttgccaggttactctcttgctgctcttgtcggcatgcttcgcgtctttagatcaggatttattgttagcatgtttaccttggatcgtttctgtaccaggatttcttgacgcagtggttcgatcatgtgcttggtcaagaaaccaacagttcttagaggtcgtgttgtgtgataacgaatctgggattatcctttaggtgtgacttgtgcagtaattgttttatcgtataatgttttattttcaaatttcttaaataattcattttattaacttttatttaatgactttgattctcttcaagtgagacagtattacagagaattgctagtcgctgtaaacttcttcgctggtttaacgttacttttgagagcaatttatctgttgttgcttaagtgtattccgcaaataattatttcaagcatcttgaaatatatctttgttgaaaaatttgcgaaagattgtattgagtgatgataacaaattgcatgatcactctcagaagcgccttgatttagcaatggttgctcggggatgaatgagtacgaacagtaggtactagttgtgacacttttctaatgatcgcatctctgttgctgagcatggttgatgaccaaactggtgagaatttgaagatatcgtaaacaagtttagaagtaaactgatattttttgaggaatattccatgttatttgcgacgtcttttaatcccagtctaggtgtcaggttgtcaactcataaatatggtaccgaggactcgagtgtgtagttatgaattacatatttaatgtagttacttctgattgttctccaaaaccttgttcacaaaatgaccgcagctaaagcatgccataggtcttatctaccgattgtacaatgggaaataacatgttcgttgactagttccgagtaattctgatttactctgtgaaggaaagctcagtagagtgttctttgctttgatttgatttttgatttattttttgaatacttgagggttgttagtgctcctctcttgcagaaaatgtgggtaatcgcacttgtgctcacttaattgcaaagaatactttcatcataaatcgtttcagactctaattaggggttgtgaagcaggtctatacgagaa

SEQ ID NO: 14911 - DNA, 772 bp, Physcomitrella patens
  Intron number 2 from transcript Pp1s307_65V6.1 (locus Pp1s 307_65V6) derived from phytozome v7.0 (chr-ID scaffold_307 ; pos 375373 to 376144 reverse strand)
aatctcaactcctacacaagtatcctcatcttaaggtaatatactgacgtcctttctcctttcatcttagagtattgtccaccctaatctgtctttgtttttgtttgtatctttttttgttttttttatatttttgtttgtgtttgtggtttatgtttttaataataataataatattattattattattattattattattactattttgtgtgtgtgtgattttttattttttattttttattttattttaaatttgtagtttgtcgtagaaatgtagtttagatcttttgcagttggaatatgggagttgtgttgtacatcttctaccttacgtgccgattagcgaagttgagtcagtggaaaatgcaaggggtgcactattctgttggcttgtaactttcctcttcgtctgataacgtcactgaagagtatcctgtcgagtccaggtcagtaccttgcttgttgttgccttgaatcgattccttcaaattgctagtaaataatttgtgttgattttttcttctttttactaactacattgaggagcagtcattgtatcgattttgtagaatgattttttacttagtttgtgaacgaatatttcttttaatacaattcttttggaggagcattgaatgtcttaaactacgactgagatggtcaagaaccagaccttagcttaacttttttgctgtactcgtcttctaacacatcgcatgatacttattgtaaagctgtgttttgccacaggtagtaaattttagaggaa

SEQ ID NO: 14912 - DNA, 1283 bp, Physcomitrella patens
  Intron number 2 from transcript Pp1s271_21V6.1 (locus Pp1s 271_21V6) derived from phytozome v7.0 (chr-ID scaffold_271 ; pos 125550 to 126832)
gttggaaatacttggtggcaagaaatatcaccgtaggttcactagagtctccatcttgcaatttgttcctgtgttgtatgataatccttgtatccttggtcttttcggacatgcctccttagaatcatgcatcgacaaagtaattttgttgcttaccagttttatcgtgtttctctcaaattgtaaagccttttttacttcttaccttttctaaagcattcacgtagtattttagagatatatttctagatgaatgagcgtaatgtatagatttgaggaattagtgtggtgacttatataggatctatctataggtactattctacgttttctatgcatgtaattgaatagaacaagattttataagtacatcggcttagtagcccatgtcttgtgatctattttcctcccttaagcttaacaaacatactatttgttctagagggccttggcatagatatcaagagagtagaaatatcgaagtgaaaccttataaaaatagagttcaagggtaatcacaaacgattttgctacagattactggctttttagatattttcaagttgtaatttcgcgatttcaaatgcacactccgaacacccccacttctcttctctttttttcctcctctacgtaccagcctctgcagcgtattttttcctcggttcttcatgtggttccctagtgatatattttgtagtttgcatcacccgctctgcaggcctttagtactccatgtttgctttaacaccaacctcattactgagtagggttgtacatctgaatgctgcaattactttttggtaatttatacacctgtttaatgctactaaccatcaatgttaattttcctccggaagttttttttacatatcttagatgattagtgttcttgctgcgtttgagtttttttacctagctaagtgtggtttttaaaccatgtcgaaccggaaataaaattaagctgattgagaaatagacgtaccgcacgtaatctcactcatcaataagcatatttagcacataatttgaccattgatagtactgattggttgataaatctctgcaatgtcatgcaattacatagattaagtttttgcgtagccacgtcattggcatattgagtacgtagttcaagtaaggttttttatttcgaaaacatttcaacgttcactgcgcatacgatgttttcagttccttttcagttttcggctagcgcattaagtccccttttgttgtgtttctgttcagaagaattcaagtatagttggagtattggttgc

SEQ ID NO: 14913 - DNA, 338 bp, Physcomitrella patens
  Intron number 5 from transcript Pp1s35_253V6.1 (locus Pp1s 35_253V6) derived from phytozome v7.0 (chr-ID scaffold_35; pos 1351318 to 1351655)
cctgctaactcagaaattaaacgacaagagaacaggttacagcgtttaagatttggaattttggctttattgttcgtttctaacccattcaacaaaataatgtcatttttttggtagattagcttccggggttcatactggctcagaaagactagaatttgatgacataattcagggtcagctaagaataggacagttatctgacaaacactcatcgataataattaacgttcgaagaaattcaacaacattttattctgtgttttcaacattttcgagtttttattttcacgtgtgtttttctcatcaggtttgaagtaaaagagcggctacgcagc

SEQ ID NO: 14914 - DNA, 3074 bp, Physcomitrella patens
  Intron number 14 from transcript Pp1s54_8V6.1 (locus Pp1s5 4_8V6) derived from phytozome v7.0 (chr-ID scaffold_54; po s 44944 to 48017 reverse strand)
tgccgactttccctcttcctgccagtgcttcgaaggtaagtatcacaaaaagatgaagtcactaagacttgaacacaaagggattttttgtcctataacttttgaattgcacagtatgatttgccacgaatacttccatagcatcctactgtgacgattaaagaatgaacaaaaatagagtaggcttcagaagagacgctcgaacagacataagaaaagtgctggatggttagatctacagcatgaaccgttgttatgatttgggaagaggacaattacgtcaacacagaaatctcgacccagacacgactaaatggtcttcttcgcccccatgaaatctgcatttctgtcgtcatatcccagcaaaaattgcagaaagataattgtccgacttgctatgtctgatggtgagttgcaccttgacattactaaaaacagataacctcaaaatatggtgaacagaaatttaaaatcactgagaattttttgtttttgttgtgggaaatctggaaataaatttaaagaataatttcgccttacctataccaccttacaataacagccacatgagggactgtcgacgttagatcaacttgaagagcaaaatcttctcttcccaattggagtgggtgatttgaagactgaattttgaagttcatataatacggtactgattatattggcatgtgccggaaatacgaattaatcagattttaaggttaagtagttctcaaagcgaaagattttccaagtgtggaggccgcccttagaaggttgtagaatgcaggtcaatgaggttccctaggagcctgcaattctctcttcgatactcatgcggaagtaagccactttaacacggtttaggcgatgattgattacatggaatagttcgacctcctgataaactacttaactttataagaaaacaacagtcctcgtccttcagtttattaccggtcatgaacccatggacattcatcaagtgcatgaggtcaccaatgtagaatacttaaaaatctgatttttcttgaacacacattgcatcttcacgtgcacagattagaatgcggcacatgtaaccgttcggcacctcaccagattcgcgcatggtggaaaatgttcgcaaggctcctttctgtatgcttaatctcaagtaaacgcgtaccaaagtgccacagctttccgtgtcatcaacccaaccagtgtccagaaataagctgacctcgtctgggtcaaggtcctctttcttcatcttcttgaccagacaatccgatttgttgcacagatctacatttccatttgcaaagatcatgaagtcatgacgcatggcacctaacgtcggaataccttaaagcaacaactttaggtatttcagctatctcgggggggattggtggagaaacaaggttctgatgtgcttcaaaacaaaaaaaattacaaaatctgtattggtttaattgatgtaaaatttgaaagggttttacactttgagcccctgaaccaacacatacaattggccaaaaccgtccataaaaacacattaaaccaccacttccatcacactaaaccaccaactttatccttataaagtttaccaatcattagtgggcttgaaatgggcttggaatttttctacaggaagaatggttgttttagggtttaagcaagggcagcttcagacaaggtctactggttgattcatgggcgtgtgacacgcttcaaggtatttcgacgttatactctaacctaatttctccattgtatccattatgtgctccgcttccttgattacaccctattgtccattagtttttcagctgcttctccacagttgtctattggacgctagctcgttgttcctcatatcattcattatttgctcttactcaaacaaaccgtcacgcgtgtaaactgcaatcgtagcagagtacgcggccaccacttgtaccccgctctgcaacatgtgcgataataagttcgcacatgttactgagcggggtacgagtggtaaccgcatgctcggacgcttcaacttcatatccatgcttcctcaacatcaccatagtgctaatgcagcatcctcgtacttcagttcattttacaggctgaaccccaattcttcaacattgtctggaaagatttcgcggcatagtcagcgcaattggccttgcttgccctcatagtcaaggtcatgaatgtgtagtcacccggctcacaaccacctccctacatgttaattagaaggttgtccattcatctttttattctcgctactaaaatctggaacaaacatacacttttttcccgttctcacgcatcagtttgaaaaacctccaacgcttcgtcctgactccttccatcattctgaagaaaaatagtttcgcatgatgggagaagtaacttaagacagccccagtcaaatttgaagtgacgatccggacgtcaaaaacctatcgattaaacaaagttgtttatcttatgctttaggccccttcatgacacttgcgcctgtcaagtacactcgacttccccatgatctcctctttaatctttgaacacgaccctagtaattgtctttactgagactttcgtaagaggcttatgctctacagcctcagaattctcgaaaccgcaacctacatccaatccccccgcctacatccgaatgtgtccctagcaatactccagcaatttcaatgcaatataatatagacttatcaacctcggaggaaaaggaaaaggaaaaggacaaaaaaaaaaaaaaaaaaaaaaaaaaaagtctagggaacggccaactccctggtcattagaagccaaatgatcctacgccgaattatcctcatccgagtccaattcctacacaattccctctagagaagcctcggcaccaattctcacttcccgcaagtccagagaaacagactcacgatctctgctagcaactccaattgctcatcacttcaaattgcacaaccacgtggacgatggaagaaacttattgttaacgtctgcttaatgtgctctgcaaatttgaatgagattggcttcgcgcgcttctccttcttcccgccctc

SEQ ID NO: 14915 - DNA, 341 bp, Physcomitrella patens
  Intron number 1 from transcript Pp1s37_352V6.1 (locus Pp1s 37_352V6) derived from phytozome v7.0 (chr-ID scaffold_37; pos 2323495 to 2323835 reverse strand)
gctcatcctgcgaacaaagtgagtctacaatttcatttctttcttcaattcagaaactacgagattctaaagtgctcggtcttatatttctcatattcaaatcagcagaatgaactcgattcactcagagtccacttttagaacctagacgtgctcttaagctcagcattccagaaacattggtgaagaagcaagtacaatttggaggaaatacaatcgaactagttgatcaagttcagtgcataatacttcaagtgcatccctcttgttaatttgtagctattcttaattgaacatccattacagctatatttttatcgccggagattgcacatcgccag

SEQ ID NO: 14916 - DNA, 736 bp, Physcomitrella patens
  Intron number 1 from transcript Pp1s8_166V6.1 (locus Pp1s8 _166V6) derived from phytozome v7.0 (chr-ID scaffold_8; po s 1521319 to 1522054 reverse strand)
catcggtgaagctcccagcagtcagtcgtgagtattcttttcctcaaatttctgattggtgtaaccactgcatacctggtagtcgcatttgttttctctgtgtagcaatggctgtgagagttcaatgtcgaggctcagccggatttggctataaaatccgataactcgggggtagatgtcgttaaaccgcggaaatattgcagaaaaccacttagatcgatttgttgaagtctaccagtactaccgataatggaatttagtggtattttagtgattgtgatagggagaatgtgacattattgtaaccctgtctatcctggtttttcaattctgtttaattcaagcttgggagttcctatttttattgctattgtggaatttttgtcataaaagtcttttagtagttcttcattgcctacactttgacctctgtagcgcagtaatggatggctctagtgagtggaagttcttttcttcctttctcacagccttacacctcggtactctcagtgtttgtataagcagtgttgtcaattaggagcatatcctgattttaatccccgacatccctctcagctgctctggttttagttgctcgacttgcaatccctgattattgtgaatatttgtaatggccttgtaatgatattcgtaacagtctcgttttttttttttttttttttttttttttaatctggcaggtatctcaacgtgcccaacatcgtgtcgtcagcaa

SEQ ID NO: 14917 - DNA, 552 bp, Physcomitrella patens
  Intron number 4 from transcript Pp1s93_56V6.1 (locus Pp1s9 3_56V6) derived from phytozome v7.0 (chr-ID scaffold_93; p os 657256 to 657807)
aagatccacccaaagcagaggagcccaagaaagaggtaagtttccaaaattccaccaaggagaagagaacggaatacttgcaactagctttatgaacaacttcgaccaaatcagtcggcaaacttttcttttgcaaactcgtgaccattgacatcagaattcatctttggcattcaatcattcttaaaaaaaaatcaaaggcagttatcaacatgagaaagacagtgagagttgagatagtccaccaaggatttcacacaattgtaagacaatggcttaggatataatacgggttacgggttatgacccactactcaaaaatacaaatcaaaagaatggcaagaaacaagaaacaattaaatcaataatcaaactcaagagtcgacaccaaaatgtaaaaaaagagaagaaaaaagaaaaagaaaaagaaaaaactttgtacgttttgtagatatttatagttgtagattgaagcttgaagagacttgcacgtgggggtcctgtgtcgatgacgtaggaagagaagaaacctgaggccgcggcaccaccacc

SEQ ID NO: 14918 - DNA, 1113 bp, Physcomitrella patens
  Intron number 12 from transcript Pp1s83_67V6.1 (locus Pp1s 83_67V6) derived from phytozome v7.0 (chr-ID scaffold_83; pos 651539 to 652651 reverse strand)
gctcaccttggttagggcacataaatctatcccaggtactttagctgactcacaatgaactgagcatcagcaaatagagccagtctcttattccccaagcactagatacagtcgatgttctgtgcaagacttctttgaacttaaccagatttgtatttcttaattcttgaaagttcttggcctgtgtctctggttcacaatactggtgtcagggatgtgaggtcacactgtctgcatgataatgcttggctttgggccaagtaatcaattttcagaatacgtcaccctaatgcaactgcgactggatggttgaaataggtaagttgggttaaggaatcgtcagattaatactccaacctgagcatgattaggaacttgtaagtctgatgtgagtgcttatttagttcaaatgagtctcatctacgatcttacgttactcaatcagagaaagtattctttttctttttcctgttttaagtaaactgaaatttcttccgttgcagaaatgaggtcacacgtactgcttatggaacttccgcaattttctaatcagttgctaccaactttttttttgcaatcaaaactttgatcatactcccgattcactcggtcctctgtgaggaacgatcaaactcagcaactaactggttttagaaaaatctctcgtgttcaattgaagtggtaacaatcattattgatagaagatgaattttattttaaacaaccttctactggactactaagtgtgacacagcccaaccgaaaaatcatgccgccatttaggataatggctagtgagttagtaacaaggaaaactacttaataaggtggaagaattgctctggaaatctacctaccatattgaccgaacacaagcttttgaaatgcgttttttatcatattttcctaccttatgaattagttttacatagtattcttttttatgttcaatgctttcttttttgtcgaatcaatgtctttcataggggcttttccgtctttgttgtctaggtttcgatatatcgctgtcacaagtcgtaagttttgttgtcagaagttgaagctaaacctctagcaatcatagctgcttaccctgagttttttgattgcagg

SEQ ID NO: 14919 - DNA, 1017 bp, Physcomitrella patens
  Intron number 1 from transcript Pp1s8_179V6.2 (locus Pp1s8 _179V6) derived from phytozome v7.0 (chr-ID scaffold_8; po s 1642547 to 1643563)
gacgcgctgcgacgcgccgttctaaacatttcctggtcagttttcgttcccctcttctcagttctggacacactctatcctttaagcagttttctgaattctatgctcctctcaaatcacgagtgaggccctcaggtgtaggtgtgtaacttgacacttgcatgtgctagtctctgattccccacaagcgagggagtattttcttcttcgctagtttgcagccacattcgaatgcgggttaaacgttaaatgcttgcatactgactagaggaatggtgtttcttccctgacacagcttactcatcccccttccgtagacgagggagggattctttgtggctttttgttttgagctgtattctcgacttgccaattgttcctccaaagctactaaatgcctttcaattgacaaatcagaaacatgtcaaggactttgcaatagcaaaggctccttcagaaagcgagctagtttgcttttagtcatatgattctcggagcggagagacctaaggatatcggagaataaagaatgttatatagtctgtttgctctttcatcatgataagattcctccgaacgtctttttggtaccttgaaactaacagctcgccacccaatacctgcactatatcgaagcaggtagttatgattgaaacacagtcagtaaacctatttgcatcttagaacggccgttttatactaagcctgcaagtcgttattctaatcttcattaagtttaagtcccgagaataaatgagaaacatgcttacccttgctacagtaaaaactgctcggcagttcaagaattagacttgaaaattataatcggctagattcctataacgcatgtctgaactccataggataatctccctccccttgttgctctcttcattctgacacaattttattgctgtccaaaatgcttggtaacttttacagcatgttcactagttgctaatatgactggatcaacgtgcaggaagacagggtcggaagtaagaggattagtccggc

SEQ ID NO: 14920 - DNA, 11308 bp, Physcomitrella patens
  Intron number 1 from transcript Pp1s22_163V6.1 (locus Pp1s 22_163V6) derived from phytozome v7.0 (chr-ID scaffold_22; pos 909206 to 920513 reverse strand)
gtcggttccctacagaaactagtgtgttactagtaagaaataagaacttctcattgatatataagatttgacttgtaatagtgttgttgtttcccgatattcttggtgtagtattctgtgaaaacaataggtcaataggcccacgcttcgttgttctgttatattttttttagagtgctagatcagagtgttaatcaaggtcagggtcctagattttgattaattcagttgtttacaactgatttagttgttttgttttcaagtaagtggtataagtggtatcgaacaagtaatatcagagggactggcttctttgagagcgattgatcaagtgattagaataattcagtggctaatccagtattcagtgttcagtatattttttcaagtttttcagtcgcagtttttagaaagtttgcagtgcttatttgttctcttgaactttttcttgattttcttgaacttcttgattttacaggcattacatttttcaacttcctactcattttttgtttcttataatttgatcatgtttcaatttgatcacaatgttcatctataaagatctaattagaatttagtgtttcagcgtttcaatggttcctaatttcacttatggaagtggtagatcaagaatctattccaagcaataggttacatcactcatattgatggcacaaggcgaaaggaaatagaaaatagaaattgtataatggacaaaagcctctaattcaatgcaaaattgcacaacaagtttagaatagattaatagaagagcatgaatttaaaaacagcaccaatgtttatgaacttaaagcgatagttctttaatgctagaatttaacatggtcaatccatttctagtttcatagctaaattagaacttattatgagcaagttggaggatatagataatactacatttatggattcctgcatgatatctaaacttatttcaaacctccttgctagttctaacaaattctatttagtatatgagagcatagcaaaagatgatcaaaacttatccaatttgaaattgtgtttgagaatagaagaatatagaattttattacaaactaaaaatgacttaattacaaaatcaaaggtattttattctgaacgtcaatgatctttcaatataagtagttatcaaaggtaatctactagtaggagttataatcttcatggattaattttaggtatgtatctttatcaacttgtccaaaatttccaccgaatattttaagactagaaccattgtagtatctaagacttatgtcatggtattcatattcttcttctcaatggctacatacttcatcaaagcaactctattattgaatgtattttttaaagagcaattatattacttacatacacatttactccaatagttacttatatgattagatagaagtaggtaaatatagattaatttcataatatatctttgactttacttgtatttataattgattggtaggttaaaaacttggtcaataagttaaccatgtaccacacatcttaatagcttgtggaacaatttaactatatggtgcatatatagataacttgccttgcaagttaaaacatgtgtctagaaaagtcaacatatgttagaggtcttatagaagattgccacatagttcctaattagaaggaatatatggagttgagagtgaagccttcttcattcttatcaacacctttctaatccttactcttatttcaaaactttttagtcatcttgtctttggcaatagtcattctagttcaatatattaccatctttgagtgattttttagtcttttcgagtaacacaagagtgtattgaaattttttttctttgagattcatgtctttaataatttgacaagaatgctaacttattgtctttatcttattttaaaagtgagtaaattattttttctattattatattttaaaggttgcaaattatgtacttttaaacaaacaatttagttttttaacattgattttttccttaaaaacaatcaattattcttctttgtggaaactttcatttgatattaaaggttatagattaccctcttttaattcaattttttggatttatttaaattatttattaatatatatatatatatatatatatatatatatatgctattctcagtggaagtgagaatagatttgcaattattgtagatcttcacgaacttatcaatactttaagagtagaaatctcatatatttctaatgtgaatcatggaggtactattcctacacatatgaaaaaagtccaaagtctacaccaagaaattgtgtacttgaaagaggtaagtagatcaatcttacaaccaaattcaagaagtattctttctataagcacaaggaaggcaaggattagtttgcctaagaagtttcatggaataagatcaaaatttcaaagatttttgcaacaaataaagctctattcaaggttgcatcttttctaatatcccaatgcatttaatcaagtaggattcataggtgcatttctattggaaagtgttctctcttagtttgtatctttgatagaaaaaaatttacaactactctataatttgaattcattcttagaagtatttatggctatatttcaagaaagtaattgaaaaaagataccaaagactaagcttgtattgctacaataagcatcacatttagcttcaatatatgctactgaattctaaaatcttacttgtgatggattggaatgacaaagctcttatcaattagtttcatatggataaaaagataatgtcaaagatttattattgacaatgcaaagagcagattcactagagcaatttattgcttaagccattgcatatgacaattgattctttaaaagacactaagaacaaagatttggttagagaagtataaatcaagccataatgacatcctctaagtttttaaaagcttacttgtttaggccaaagcctatataaattgatacaatatgttttaaatctcttactaagcaaaaaaagactcattgttgtcaagaagttttgcacttatattatagagaatccaagcatactcttcaatattgtccaatgaagcaatgcaattacaaaatgaagagtatagttgccaaagaagatgtgtcaaatcaatggttgagatctttcttacaaatcaaaggatctttatctaatcaagttattttaagattattgtgattaaaaaaaatataatgcttaaatagattggattttttataaccttaacttttcttgtagtttgatccgaaattttgttagttaaatagaaatatataagcctagtacatccaaatctttattaataagtgcaaaagattttattattatagaaaaagaatgatcatcttttactatatatgccatgcttatttctcatgatcaaaagatatcaagtagtattgctagtgaatattaagatttttaagatatatttttaaaaaaaatatagatattttttcaaataatcaatcctatgattgtttaattgatttgtaagaaagatctcaaccattatttagatcaatctataacttattacaaaataaattggttgtactaaaagagtacattgataagaatttagctaaaaacttcatatatcatttgaaatctccaacaagaactcatattttatttgtgaagaaaaaagatggatctctatggatgtgcatagactatgggcggcttaacaagatcgccatcaagaatagatatcccctaccttttattttagaattttttgaccaactcaatcaaacaaagatctacacaaaaatagatctatgaggagcatataacctagtttgcatgaaataaggagataaataaaagattgcttttcaaactaggtatggatattttgaatataatgtcatgtcttttggactcacaaatacaccaattacttttcaacacttcataaatgatattttttataaatttcttgatgattttattgtctattatttagataacattctaatctactctaaaaatataaaagaacattaacttcatgtttatcatgtattacaaaaatttaaaaatatagcaatgtattttgagatagaaaagtgtacattctacactacttaagttgacttcttaggatatatcatttccaatgaagggctaatcatggattcaaaaaagattcaaactatcatggattagaagattctaaaaacaatcaaagatatgtaatattttttggaatttgtcaattattatacaatcttcatcaagagttttttttaagttgtagctcttcttataaatctaacatgtaaagataaaattaaatggagcaaagaagttgaagcatctttttaagctttaaagacaatatttatttttgtaccaattttgtattgcattgattttttcaaagcattcttcacaaaaattgatgcatttgactttaatatagatattattttatcacaaatgaaaacagatgacaagctctacttgatagtttttattctataaaatttttggtagcccaaattaattataagatctatgactaagaatttttttataatcatagatttatttcaagaatggcatcattatctaaaaagagtccaattactatgtatacagatcataagaaccttaagtacttcatatcaatatgtattttgaatcattgtcaagcccgttggaacatgtctatatcaaaatttaattttaagatcacttattgacctagaaaacaataaggtttgtcaaataatttttttgaacattcttattttataccaaaagaaagaaatacaacttttggccaataaagaatgattctcttgaagctagagtattttcatctttgagcaataaaatcaacattgatttttgattcaatctttgtcaagcaaattcaattaattatgtcatctaatcttttttttatgatatcaagaataacttttaagtctcatgatacttcaaagtttgacttcaaaaataatatactctattttaaggaacaattatatattaaaaaaagcaaagtataattacatgttcttcaagcttgttatgattttccaatagctaaagattttggatacaataagactttagaactaatattaagaaattttaggtggtttcaaatgtaaaaaaaatactttgtacaaacaagtgatatttatttaagattaaaaaatctttgtcattgatcttatggacttcttcaacaattacctatatcaaaacaacaatggtcttttgtttctatggattttatcatgaatcttttagttttagatttttatgattctaaatttgtgatagtaaattgttttatgaagatatcacattttgtatcatataaaaatctatcataggtgaagaaatagttaagcttttttttaacaatatctattgctatcatggattgctcaaagatattatatcaaataggtgactcaatttatattaagattttagagaatcctttttaagattctaaagatggatataaaactctctttgatttttcaatttcaaactaatggataaatggaatatgtgaagcaagttttaaagcaatatttgagatgtatcattaataatcatgaagataattgaataattctttttccattaacaaagcttacatataataatttggtacatttttatattcaataaactttttttttgccaattatggttatcatccacaacttaatatttttgattttttaaaagttgataatcttgatacaaaagatttgaaaaattgtttgtgaaagctacatacaagaagaaaagcacaattaaaagaagctcaagaatgacaaaagatcaatgtagttgcttgttgcaaagaacaacgataattcaacatggatgacaaggtataattattttattacaatatcaagactacttgtcattataacaagttggattattgtaagcttggactttttcctatttgtgaataaatcaatcctattgcttattgattactatatcaaagtctataaaaatatattatattctataagtctttttttgagccatataaaatagtgaatatcaaaagaagaagacaaatgccacctctttctataaaaatggataataatcaagaattttaggtggaagaagtcttaaattgaaggcattactagaatagattaaaatatcttattcattaatgtagatataatattagtaaacatttatgggagccaccaaagaatcttgtaaatacaacaaccaaggttgaagcttttcatcaatgacatccattaaaatcaagatgaagaattataagatctataaaagatgatgatcatttcttgtgaaactcatctttagaaaggaagataatatcacaagcatatacatttattccaatagttatttatatcattaaatagaagtaagtatatatagattaattttataataacttttaaaaaaatattctagaagctttatagatgtagttttgacttaacatgtatttgtagttgattaataggatagaaatttggtcaataagttaacaatgtaccacacatattgatagcttataaaacaagctaactatatggcacacatataaataacttattttgcaagttaagacatatgtctaataaagtcaacacatattagaggtcttatagaagatcactacatagctcttaattatagagtatatatagaagtaagagtgaagtcttcttcaatcttatcaatacctttttagtcctttgtcttatttcaagactttatagtttttttgtctttagcaatagccattctaattcactctattaccatctttgagtgattttttagtctttttaaatgacacaagagtatattgagattttctttttttgagattcatgttcttgataaattattgactttattttttacaaaataattatcaattggatataacacaaaataatcaaaattcttattgacctcaatcttatcaaaatacaaaattcaaaaattagtggaatgaaaagaaaaattacatataataattatgaaatctttagacattagtggtaagattgtccttaagatttttaggaatcaatgtccaaaccatatggattacaatcaagacaaaatacataagctttatttgaaaaatctttagattttagcacttttcaaattttagaagctccttatttagaatcaaaaaattatcattcaaatgatttatatcaagagtaatattatgaatcaaatcaaaatagatttaattacaattctgatattactcaagcttacaatacattaacatctaagaggattacaaaagaatggatagttgacaatggcataataaaacatatgactgagaagattcattggtttattaattaaaaacatctaccagcaaatgaaatatggcttgttaaaatatccattggacataaatattttgtgatggaaacaagtgatatcaatatttcaattcaattatcatattcaattaaaatccatcttctacaacaagttctttatattccaaattttcgaagaaatcttttcagcctaacgaaggttgcaagacaacataaaatatttactctttgcaaggtttcaacatgttagcttattcaaatagtactattataataacaggaagaatgcttcaaagatattatattttaaattatttagttcttctacctcttgcaacaatatcttatgtagcttcttatggtaatattccatctttagaagaattacaaaatattcaaacatagcatctttgttgtagtcacttgcattatgatatgataagaaagatggctattaatgatttaataactgatatttgacttaaatctattaaatacctaagattatgttttggatgtacttttggcaagttatatagaggaatatttttttaaactttaaattgtatttgacattcattacctagcatgcttattcacagtgatatatgtggtcctatgagtgtcatctcatacaagatcattttattatattttatttaaagatatttttacacaatattaatttattttttatattttttagagatcataggcttttatatgttttcaaaaggtttataaaaccatatttatagacaccaattataaagtttttactttataaatggacaatggaggagaattttgtaatcaatgatttaatgaatttttacataccaaaggcataaaacatgaattaacagtttcatattttttaaaagaaaatggaatttcaaaaagagacaatcgtataattataaaagctactagaagaatgatttatcatgttccttttaatccaaaattttgagcaaagattgttaataacataatttacaccttaaattgcatatattcttttcttcttttaaatattatttcttttgaggcttatattagaaaaaagcctttctatttttatatgcaactttttggatgcaaagttcatgatcatgtacttgacaaattaaaaaagaaatttgatgctaaaaattgcattagattatttttagatactttgatgaatcataagcttattgaattaagattcgacacataaaaatcaatcaagatattatctttgatgaacataattatatataaaataatattatccaaagaaaatattatttaaatatagcttcatttgaagtttttttttaggaatctccttgaattttttaagaatttataagacctttcttactagaattaaatatgtgatctataaatacactttgaaattttataactacagatttggattctcataattcttaaatacatgaaaggagtatcaacaatgaaagtactcatcatatcaatcatggatatgatatcaatatgagcaacaaaaataatacttatgatgtttgagatcatattattagtgggagcaacaaaagcgatgttcaagaaaatcatggttatataatcagtggaagtaatgataatcaagctctttatggcaatatgcacaacaacattgactttatttgtgataacaatctggatattaataaaaaaattacaacacaattttgttcaatacaatacattacttattaaggttgatctttttaaatagaattttgataatattcttgatgttttatcttttaattagaattctcatgatattcttattgaattaaatttataaattttattatctccaattcatcttacacaatatacttgtcatcttcttgatcattatggatattttataaatgagtggcaatacatatctacaaattttgtcatgacattatcttctgcatctatcaaaaaaaatatcaaaaattcaaaacctaccactactttaagtttaatttctttgcaacatcagttatcaaaatcattcactattttattataattaactcatgattctatgaaatcatcaattacttcatagaatatatctacatctttattggagtcaaattctactccatcaattatgcaattaatgactcaatttataccttttgttcctcaaacatattaagaggcacttctttcaatacttacttcaaaatggaaggatgctatgtgtgaagagtgtcaatcttcaattaataatgaaacttttccaattaacatatttgcctttcaaaaaaaaaaaaccatcaattacaaatggatttatgcacttaaaacaaagtttgatggtaatattgattaattcaaagcaagattgattgcaaaagaatgttcacaaaaatatgaaatcaattttatagaaatctattcaaccattattgaatatgattctttcaaacttattcttgctattgcttgaagctatgatatgtacatttgataatttgataaaaaaacagctttcttacatagaaaacttgatcaagagacttatatgaaacaagctccaagttttgaaaattctccatttccacccaaagtatatcatttagacaaggctttatatagtttgaagcaagctaatcatgcattaaatcaatgtatagattaatttttgattactcataaacttcaactaaattttgtgcatccatatgtttattatttcaataacatcaatcaacttattgttgttatgtttgttgataatggcctttgttgttgtcaagacattcaacacattgattatgtacttatgacaatgaacgacatttttaaaaccaaagttagtaatccaaacacatatgttggtttacaaattgaaagaaattgagctacaaaacttatattcatataacaacctacttatttggaaagaattttaagtaattatggattttcataatcatctctaattactaccccaatagattgtaattctactttttgaagtattaattttgtaaaaaatgacctaattaaaaaaaatctttttataaatactcttgctagtcttcagtttgcctctacatgaattaaaactgatattacttactttgtaagtaacatctcacatttcaaaacaaaatttatttaagcacattgtaatgttataaaacaaatatgttgatatattcgaggtactttgtattttaaacttgtttatggtggcacaaattcatcaaattgcttattgcatttgttgattatgcaactgatttagatgatcaaaaatcacaaaaaggctatgttttatttttaaatggtggaccaattagttggggattgaagaaataagaaagtttaattgacaacacaacctattccaaatatattacctattacatggcaaccaaagaaattatttggtgttgacaaatgttaatagattttgattgtactcaagaaaaacttaccattttatactttgattcacaaagtgcaatttgattggcagttaatcctaagtttcattccctcactaaacatattgatattaaatatcacctgattcgagagaaagttaaaaatggagttctacaaatagattatatatctactaaaaaaaaaagtagctaatatttttagaaaagttctagctcatgataaattcaagacattctgtgtgcttctctgactccatactcaagctaatgcttcacttctccatgaagtgggagaattaagaaatgttgtaatatcaatggagaagttattattcactcgtgtgtgttactagtaagaaataagaacttctgattgatacacaagaattgacttgtaataaagagttattctttctcgatattcttggtgtggtattctgtgaaaacactaggttccctgcagaa

SEQ ID NO: 14921 - DNA, 580 bp, Physcomitrella patens
  Intron number 1 from transcript Pp1s129_157V6.3 (locus Pp1 s129_157V6) derived from phytozome v7.0 (chr-ID scaffold_1 29; pos 908980 to 909559 reverse strand)
cgaaagtcgccgagcttctgaacgatctctcccaggttgtatttctgggccgctttagtttactgacttggttgagtgtcagcagagtttccttttaaaacggtctgttcataattttgaaatttttaatttaataatcaaataataagaataataagaataataagaataataacttgtagctatcggttgtcagccttattatctaatttattttgaattccaagcatcacaaggttaactaggaagtccgtgttaagaagacaggcctgtgatgtgaattagctgcttgatcaccggtatagaggtttcgtaggtttggtgccgtttctaagtgatttcgtgttttcaatgtatacagattttgaaatgacgtaaacagagtcttacttcatgttattatatatttttaaaatgctttttataatctaagtagagagaatttgttagacaagagcacgtatcatgttcatcagcacaatttggtaaaactattactcaggaatcgtgtggtcattgagctgattctatattgtcatgtgcaggtcgtaaccaagcacctttccgaagaggacggatc

SEQ ID NO: 14922 - DNA, 2434 bp, Physcomitrella patens
  Intron number 3 from transcript Pp1s10_408V6.1 (locus Pp1s 10_408V6) derived from phytozome v7.0 (chr-ID scaffold_10; pos 3164779 to 3167212)
agctggaggttgggcgcactgtgcagctgttacaggtaattttacccacttctgttctcctattccacctgtacaaaccattgattttctcgtgccattattcttcaaaccttgttgagatctcacctccaccaccttaactgcggatagttgatactgattgagattaggtgtacaccaatcagtcattcaaaccacgctcactcactatgactgtgtgccaccttgcccttcttttcctgtttccgttggtttattggcattcagaacgagtacatggcaattgctgtctggaaaatgaagccttatttgaagtgattctgacgaaaatgaaagctgtttgagcatcattgctgtaccttacttgcttgtcggaaatgacagccgcagaatatatttttttccgaagagacatcatgaaatcatatgtacttcatggcgattaaaacgattgacttgtactgtaggcagaagattaagttggtgatgtctcagacgactcacagattttggttgtaaataagattgcagtattttccttctgcttttcaagaaaagtctttgtgtttgttcaaacgatacgtctttcaggcatctgatgagcgatattgtttcgttgtgtttcattgcttattcaacgcagtaatcagtatttgtaattgtattactggaataggattctgcgcaattcagtgatgcagtgtcactacaattataagttcgctcgcaatttttatcaattcttttggcttgcaaactacgtagtctgaaaacaatgtagtttgtcgatgtaagtcaatgttgaacgtgtagaaggttggagattgttaactgcctcttactaggtcctaagttgagcagttagttgtgtaagtttctaagaatttagaagagcctgtctcgttcctttgcacttattttgagtttatttttgaacatgtatggcagtgggagattctgtctctgcacagctcagttggcatttgagtctgcttatgccaagagtggagcagctgtcaagcttttgagcaactcctggattcagctcaccgcgtggcctcattatctgtttctctggacgataggatgagcacggtgggtgaggctgttatagatgatgccttaacgtcttagacataagtagcaattagagtcttaaggagttcagaatactggctgcatggctagtttaatcagtgaccattacacttcgcccacacctttctccgaaaaaatattgtgaggtgtagcattaatcgatagaaaagcattatatgtgagtgatttgacgtattcggcacgtacaataagctgatgagattcgagtagaattcaggcaagttgcgttgcaattaggttcagggtatttttgtttattttgattgacgtgtgcttcttgctgaacaatatccattatttcgataaatggagcagatgattgatctgcaatgacaactcaaatcggaaagtctttcatccataattattgtgaatttacattttttatgaagacttatctgtcatttattcatctatgacttcgtatactcttttgagtagattatggacgactgtttgcaagttagcaggatcaacgttgatctggatgtctggaatatgtaacactgaacgttaaacctgttttttccgtggtagctggagcactaactgctttgaatattgacatttcttcgggttgctttttatacttggttcttctgaaaatctcaaatagccactcaagaagtacccactacatactttcttagattctgcacattgtccggaagccatggtttgaggtaaagatcgtagcgtcccttagcaatactaagccccaaacttagttgatgacagctttcgtcaaatttctatcatcgcggtcccttgtgttttgaaagtgcctgcagtacttgttgatattacaacccacgattatcttagtttcagaatctgataatatgtgggaaaatatttatgatgcatcccagttcttatcctcttgcctggttggacagtaattgggacaataattttgttttatttcttattttactggttgtttcaggctttttgttcattttttctgatgcagtgctatcagacagatgcgtcctgattttcattactctcacatgtgaaattcacgaccgaatagtcttaacattgttttagtggtttccgaaaaaattcttggaacagctgaaagttgaatgttaattattgaatgttgagaagagcgcgtggatacctggtccttcactggatttgtcagttttgaaaagctcggatcatcatgttatagatctcatgtgtttcagttagtcattactaggtccctttagatgtatgaaaatctttttgaaatgttttgataataagtagttgcgactgttctgaataacctgactagcatgatatccatgcacaggtg

SEQ ID NO: 14923 - DNA, 1165 bp, Physcomitrella patens
  Intron number 1 from transcript Pp1s164_104V6.1 (locus Pp1 s164_104V6) derived from phytozome v7.0 (chr-ID scaffold_1 64; pos 711278 to 712442 reverse strand)
agcctggaccaaggtgattgcagaacaattgccacaccattgctaccataatgaattagaatttggaatttgaattagaaaaaagaatcaacttcatcagcactgaagtctggatcacattgcttctccggaagtgtcaatagaagctccaatatcagcctcactcactacatgcaaatcacaatctaggtcccaaacatccctctccagtctacaatttaaatactaaaataacccgttccatttgttgaaagcagtattatcccctgacgtccaacaagagcagaaagatatacttgctacaaggcagctatcttaaacactcacaatccactgcttcaaatgacccttgacctttttaagaaatcagattgaatttcagacttggaacaagaagacctctgcaagccacgcagtttcgaatgccagaattattgattgccaatgcaacagagtacacactcaaagcctgaccacaagtcacggaacaaacagaagataaaaaaacactaaaatgacaaaactcaatcagtaataaccaatcaaagagaaaaaaacaaggagttggaacagggaactacactagagcctcttcaatggcacaggggcaatattatcaagattgcgcattctactccaagatgacaacgttgccactccacgaaaacaacatcacggaacagcactccgcgagagacaaaaaatcaaggcatagatgatggcgccacaacccccacaaactaccaagatctaaattgaaacacacagccaaccctccatgcttcctccctacagccaatcactttgaggaaacaacaaaaatggctgccgaagaagaattgttggcaattgatatccagtactctttgtttgtcagccggacaatcacaaccgcaatctagacgtattcaccaacagcaatgctagcagccacagaatcacgtccacaccaacatccttgcagccatacggcagcaccactaaaatcaagaatcgtagcaaaaccttgttgcgaaagaaggaacctaatgctgaacaccaatgtggatgaactgtagcttcaaaaccactgctattggactccagccactcaaccgccgctatttgaactttgtcgtattctcacgtagaaaaccggttatcaaccaaaagagggaaccagctg

SEQ ID NO: 14924 - DNA, 604 bp, Physcomitrella patens
  Intron number 7 from transcript Pp1s344_26V6.3 (locus Pp1s 344_26V6) derived from phytozome v7.0 (chr-ID scaffold_344 ; pos 204833 to 205436 reverse strand)
tgggtgaaagacttcccaggccaagctggaatcaggtatttttccaactcaataccactgctcttgagaaggaaaggaagtaaagtaaataacttaaaataacaaatgaaagaatgatctttgaaagagatgaaatgtatttgtagattaacatctatgcattttttaacattattctatcttgtggaaatacgataaaaccattgtgtttgaaatgttggatacttttatttgactcttgcaatcatatttttgttctacttatagattcagaagttcaaatataaccacagcatcagctgaatcttccatcaaaaaatttaatctgattttacttttacacaaaatttaaggtcctagagagatcttcatttaattaatgaaatgcaattcatacattgagttcatttgagagctttttattaagagaatacttcaccttgcatgaataatttcttaatgtgtattgtattccggtgttgattttattattttattatttttttcatttttcctttttcttttggttttcttggtgagtaagccttgggagtggggtggtttgttttttgttttttgttttttttgtaacagtgctgggcaa

SEQ ID NO: 14925 - DNA, 558 bp, Physcomitrella patens
  Intron number 2 from transcript Pp1s3_372V6.1 (locus Pp1s3 _372V6) derived from phytozome v7.0 (chr-ID scaffold_3; po s 2193747 to 2194304 reverse strand)
cctcgacgtgtacttgggttgagtgcagtaaacgagcacttaattcatcgaatctcctggcggctagtaacactacacgagtccattttggttcacggggtaacaatggctctaacccagtatttaaaattctcgactgccaacagagttacatgtacgtttactcgaacactacctgactcaccgccgtcttctgctcttcatcaccttcatacagattaaaatggttctggaatcatgtgaaagaaattcgttatgatgttggttacggcggcactttgttgattcgtctgaaatgacctctttgtggttttgtgatacttttacgttttaaagatcttttcgtaggagaatgggttgttcaggatttcgaatttgaaactagctagaattctcgagttttgattctacacacaaagatcttaaccttgagaaattctgttgtgcttggctcttaaaggtacaccagaatgtatcaaagattgctgttgattttcatggattctttaccttttgttaacaggaaaagggctgaatttccagccttgaagcaaacca

SEQ ID NO: 14926 - DNA, 578 bp, Physcomitrella patens
  Intron number 1 from transcript Pp1s359_15V6.2 (locus Pp1s 359_15V6) derived from phytozome v7.0 (chr-ID scaffold_359 ; pos 98044 to 98621 reverse strand)
tgcagctccagcgattaccaattcgcggcctaaccgtgagtatttttagacgaattgaggtttctttagggattttccttgcagttgttttttgatcatgttgtggtagtaagattctacgaattgtgtattgcgttggcggagatttctctgtcaatcgtgagcaatttcatgagggtttagggtttgtggtactgggatgaggtcgtaaagtatgattgatctttgtgatgatttgtattagtgcatattaggtcaatagttgagtggtggacttgtgagatttgtgtggattgtggtatagtgattagtttggtctatattcacttgtctcgttttatcctgataagtttcgttcgctcggtatttagtgaaatgattcttcgcaaattatatttttattgccttcagtagtaaacatttctggagttgagttttagtagccgttgtagaccacttagagatcctgtcattccgttgcactcttgatgagataatgaggcttgtctcattatgagtctatcaggtcggataccatggatgcattttctgatctctgtcctatatgattttgctag

SEQ ID NO: 14927 - DNA, 479 bp, Volvox carteri
  Intron number 6 from transcript 81789 (locus 81789) derive d from phytozome v7.0 (chr-ID scaffold_28; pos 996119 to 9 96597)
agcagcaccggtgaggtttacatgcatgcacagtacatacttacaaatagtgggtccgactcacaaccatgaagggcattgcaagctctcagtcgaggtgtgggccgagagcatctgccatgctgaaagtccacatgcattgaatctaacggctgaatgtacccttgagtgcgactgaccctatggtctggtcatgtccagtcacatttgtacgttgttgtagtagctggccgctgaaaaggcctctcgagatgctggtggaccgcttagcgcatatttgtagttgttatgtgtgccgtactgtgtactagctactacagttgttttctccgcattcttccaagttgcaacttccccggtgtaacctgttcacctcttttcatttccgattttgtactgtgtgtgtggagacccatgaggtaccatggggcgcaaagttcgtaaactggcaattgtcgacctgatgtgcagacaaacaa

SEQ ID NO: 14928 - DNA, 1117 bp, Volvox carteri
  Intron number 6 from transcript 116238 (locus 116238) deri ved from phytozome v7.0 (chr-ID scaffold_4; pos 2162102 to 2163218)
ccggtgagggagccggggagcggagagggagtattgccactacccctgtaacgcacattcgcacgggaaatgggcaaccaacggcaacggccatagggacggcgcctcccatcactctttcgtacgttcctcagggttgtgcttccctccccattctttgtagttgttgttgttacagggtagttaagcttaaccagtggcctccttcccgaggcaattccctgctctcccctgctagaggggcaccctaatccattcaccccatccgacttcatagtgtattctttgggttggtaactcaccaccagcattcaaccaaatctagcggatcgtcggcaccagttcctggtcagctcacaagctgatttaattacgtcctacaccgtccacaagatggggggcctcctcccatttcatcacctcaacacacccgagaggtcggcaggcggatttgaacccggagtctccgggagcaaaagtcaggccttaacctctgccagccacctaggttgttagtaggtggttgttagtaggtgcttgttagttggttgatagccgtaccgccaccacgcagtcatgctctccaggatcacttcctcgcataaaagcagacacccacatacagccctcgttttgtccgctttggacgtcgacggctgactgtgtgttgaggacttcacctcgtcacagctcagcctcgttatacaagttatctccactctccggtttcctttctcttccaagactttcctttcgtctcgccggttaggtagtttttcccccgctttatcgccttctgccttcttttgacttggcggctagtaactcgtttcgcaacctatagctatggccacgtcgccgccgtgaccactattcaagtcatcactggtcagtaaatactcctgcagcgtttatcttctcattgggctatccgtctatttctggtatctgcttaactcgccagtggtcccctctctgccgccctcgccgtctacgttaaattataaattttgaaatttgaaaatcatcaggtccgggtcctggcagccgccacgatgggctacatccccgccgcaacggaggccgtgtggtcgccgttggtgggcctcttgggaga

SEQ ID NO: 14929 - DNA, 3131 bp, Volvox carteri
  Intron number 3 from transcript 93140 (locus 93140) derive d from phytozome v7.0 (chr-ID scaffold_30; pos 62217 to 65 347)
ggagcaatcaccacagcagcagtccgaatcttcaggtatgtgtgtagatacacttggaatggattccggagagcctagggcccctctatgtgatatgtgcctatccgaggtgatacatgcatgcatggagactttgacagaaacagcggtgggggtgttgacaagcacagagggggcggatagatggggacagattcctgagcaaaaggagcaccacttccggagaaggatagaagtgaagttctcgccacgtggtcaaaacgtttactgacgaacagtagcaggcaaatcactggcgtacctgccgtgcgcttggttgtgttgctcttgtacgaaccgtacatcctactcgtgcatgtgtgagcccaacgatacaattcttacctgcagatccgcatttgttccaaatgcaggttcacagccggtggtggcggtgtcacccggaggcggcaatagcaagtcctccaagccaaatacgacagttatcatttctgcgatagcgggttctgtggcgggagttgcggtcctggtcgcattggtcgccgccgctgttgccttggtggcgcgggcccggcggctgagaagggcggtgcccattgatggaccaccagactggggaggacggcgctctgcctggacctaggtcggataccttgccggcttacaaccaagacactaacaagctctaacagggattctgcaaacatcaacccatccgtgcacattagatcatcctttctattacaccagagtacgacacactgactatcaaacatatattagagatgtacgatatacagatgtaggttttaccgggatggcatgtttaaaatatgttctaaccagaccggacagaccagttgtcttggaggtttctgggccaccatgcttgtacgtacccctctgcatatatacatgcttgtgtaccggcagcagcagcagcagcagcagatactcttgctgttgcactgcttgctcagtcagggagcgcatgagagtagtccccgattgcgaaagctgaagaaccgctgccaagctgcggtacacgatgcggtacacagatagctacatagattggcacattgacatccgcggaggcaaggcaaggcagtgaagcacgcgaccgatgattcatgcaatcttcatcaatttgtcatttggcttcacatgcacgcacatacacgcacacgcacgcacatacacgcacacgcacgcacatacgcgcacacatacatacacatacacgcacacacacattattcacgcacgacaattatggctcatatttttatgcattgcgcgcactggtaatggatatgggagaggagttgaacaaggtcctgtaatcagttttttgcctatgcacgtcttagcttattatcttcttattgctcctggcattacggcaataagcttagtgccataacgccaggaaaattagaagtaacctatctgccttcgtcgcgcagacaaggttcggattactcgtatgtcgtgctgcgtatgttgggtacctttggcgctttacatcattcgtattattgctcaggtaggtgcggcacggaacatagacatcaatccagcctgctggcacacacatacaagagtgcatccatctttcggcccctgaatgtgcggtctcgatggcggtgtgtacggcaccacgcatggcggcagcaggcctgcctaggattgttgtattctttggcacatcacgaaatctgcatctgccgatcggtattattctaaagccgtgatatagcaattggtattgaacaaattttttagttctgacgtgggttctaatttcagctgaagcggtttctactgagcaggagttggcggccgtgacggcgaccactgcgggtgctgccaccaaacagggatcctggggttgactaaggccgtggacgccctcttctgctaggagtgggagagatgttgtaccgcgggatttgcatccgccgattggtacttctttgaagtcgtgatataacaagaatacaagaatttaacatgtatgatgtgcacggaacatctggcgtgaatggaatacgtagtagtggtatatgtggtcgttgtatgtagttagccaagattattattcaaattaatattatcatcatgagtacgtcagatgggtgttctgcagtgtttatgccaatgggcatgcgtcctgaacccgagccttagactctcgctcgagatttctccgcactcgctttgaatttcgttcggtttatctgccttatcgttggatgcagcccctgcagctggtttcttttaagtctctgtatacatataattgggggcaactgtacgctttctgccgtacgcttgcttgctgcgtttgtaaacttacaggcgcgtgcccctagctgtcgtgttgccgtgggccgttttgcgtggtcctctgcaggcgtagtactagatgggcgtacatctttctccaccgatctccatgacaaccgagtcggataatgtactgcatataaccacacccaaatcccacccatactcaagcgaccgcatactcactgcactgcggtccttgcctgttacaacttgcagcatcccccccgggcccaccggctgcaaaaaactcaagttgtcatgcaatttgaccttgctctatctgtggtctgtctgcgctgttcgcaattgtctagctgttgatattgtttgccacgtataaaggcacacgtaggtggtataaaggcacacgtggcggagcctcctaactcgtgagagcatgcgcacgtgtgacgcctccccccaccccgaggtagggagaacggagctagcggacctgcggctctcggctatgcttaggagaggggcgcagaggcccgtcacgccccttccctgtccgcgggagtgagcttaggttttccgttggggctgggcagcagcgcctggccagcgtcaggcccggtcagatacttgtaacgttcacacacacattcatattcactttcattttcacattcacattcacacattcacattcacacattcacgttcacattcacattcatacattcacacacacacacacacacacacacacacacacacacacacggctgttggttaaccaacccgggcggtggcaggcttccgaagaggat

SEQ ID NO: 14930 - DNA, 377 bp, Volvox carteri
  Intron number 4 from transcript 91860 (locus 91860) derive d from phytozome v7.0 (chr-ID scaffold_23; pos 444412 to 4 44788)
gccggagggcagtcgcggtctggccctcaagcaaggtataccaggccaccgggctccgttcgtacatgtcgtactggcattgtttgtacaatggattcaatcaaggttgtgctgtacatttccgtttctgcacgcagtgctcattcttccgtgcatatcatgctcatctacgaagaatacattctccacggttcacggacagacccaaacagaacgaataaaataaatcctaataaacaatttaaatgctgtccacgcaggcgagggctcttggccatgtactactgggcctgatgactgccgtcgtggccgttctacccactgccgccttccaacacgcagcttacagtacgttttgcctccgcaacacatccaca

SEQ ID NO: 14931 - DNA, 4382 bp, Volvox carteri
  Intron number 6 from transcript 95941 (locus 95941) derive d from phytozome v7.0 (chr-ID scaffold_17; pos 2317095 to 2321476 reverse strand)
cgccagatccagatctacagataatttcttttgatgttttctgtacatctcaagtgagaagaattctaaatacttgattttttgtgcaggctttgagctttggcagtttggaaattggactgctgcttggccgttgcttctagtatattcacggctgcggcaggtgataatacgacatacaccgctctttgactctttctttcgtagtttgcgtaatcggtcgaatcagtgcttcaccgcaagtgttttcgatatataaagcacctagcgggacactcatcttcgccacatcacgaggacataaaagatggagatggaagtgagatcaattctcgcgacaatggacgaagagaagatcgattccggccagcagcggcttcaagagcttggatacaaacaggagctaaagcgatccatgtcgtaagtgcagatttgtatttggtcatggtcaaaatcctttgctggttttgcaggcctctagcaaatgttgcgatgtgcttctcagtggtgtccatacttactggagtcactccgacgtacaacaccggccttcgatatggaggcccagtgtccatcgtttatggatggcctatagtgtgcttctttaccacatgtattgccctgtccatggcagaaatttgttcagcgtatcctacatcagggggcctctacttctggagttacaagctcgcaggctgcaaatggggaccgtttatggcatggatgaccggatggtaagggaaagtttgctctaagattatgtgaagcgctgaagtggtgtgaattccaggttcaacattgctggattggtactatgatcgcgttcattggtgctcaagtctctcaacacattcgtgtgtaatgcagtggtcgggaacagcgagcgtttgtttctcacttgcgctgttgctacaagtgacaatccttgtaagcactggaggggctaatggaggcggctactatgcttccaagtacggggttgtctgcatttacggtgcaatactcttgctccatggactgatcaacgtgcttaatgttcgatggttttcttggctgggaaacatcgctgctttatggaacatcttgggtaacatttcgttagcatttgcgtgtgcgtttctgaggtcctactgcaggtgtggttatgattggagctttcctactggcgcttttgcctcggcaaaaagcatcatcagtgttcagcaacttcaaccaagacagcagcaccgggattcacagcaagccatacacatttttactgggattgctcatgagccaatacactcttctggcatacgactctgcggctcacatggtacatacgcttttgtatttttgcatttagatgtcaaccttgacttatgaccatcttgcagtccgaggagacaaagaccgccgacaaaaccggtggatatggcatcattggtgcggtcctaggctccgtgttgctgggaactatttaccttttacccctggtgttcacgagtattgatgttccacacttactagacccaggcaatgacaccaaaggatacgcgattgcgcagctgctttataatggttttgagagccatttccacgatgcaagatggagttttctcctgttgataattccttgcggagggctctacttctgtggattgctcagtgttacaacaacttcaaggtatcctttttgtgttactatagtctcaacgaacgctcgtcttatttcccaggatgacatatgcgttctctagagatggagccttacctctgtcgcggttctggcataagctgaacgggaaggaggttcctggcaacgcagttttcttgtgcattgtcgtggccttctgtctagctttaccggtatgttctttcaactttgctttagtaagctccagtttgctttcagtacctggcaagcgaagttgcatttcaagcgacgctttctatctccacaattgcatttgatattgcatatggtctgccgatactgcttcgcgttacaggcgcaaggcataacttcgttccggggccgctccacctcggaagattttctctcgtcattggctggctggctgttggctgggtgatggtgagcaccatattattttgcctgccggtggcgtatcctgtcacgatagagacgctcaattatgctccagtcgcactgggaggcgtgtcgatgttcacattgggttactggtttttaagtgggaggcactggttccaaggacccgtcccaaacattggatctgtggaaacgtagccggcgaggtaagcgtagatcaagcattcgcgtcaagattcacatttctctcattttgcagcctacggacaacgatgacaaatcgcgagtattataggtcacgcgtgcatttctaagcaagatcttgtttttccagaacaaggattcagtttctgtacgaaaccagatcgagcagatacgttgtctctctggagaggcctgtcagctaatttctcgctgtgaattctttttgcagcacacagcgttttacgaaatgcgtgcacataatctcatttcttaatctgcgaattctcaaagtgcactgagatgatcctcgtcggtaaaaaaatcgatggtaagctctttggctgtgtactcgccgagtcaataatgttgtatttctactaagatcgttttgtttaccatatgcttgatatctgaatgcgaagatatatgacttttaggtagagcctgtggatgcttttttctagtgtttgaagtttctttcgttcacctcttgtgtctaatagtgtgcgcgtgcttgtaatcttttacagtgttgcttgcttttgaaattctaacgttaattggaaagaatatcgctgaattaatgtgcgtatgaatagtctataaacactgtattttatgcaagggagagaatatttttcttattactgtgagaagttgaccatcacttatttgcccaacatctgcttcgcttcttcagtcaggtgtagagacggcagcgccagatccagatctgtaggtaatttcttttgattgattggttttctgtagatcggaaggactctaaaaacttgattttttgtagaggctaagcgttgtcgaatttggactgattttggccgttgctttgagtatattcacggctgtcgcagctgaacggcaggtgataatacgacatacgccgctctttgactctttctttcgtagatttcgtaatcgatcgagtcagtgcttgactataagtcttttcgatctataaagcaccttgggggacactcgtcttcaccacatcacgaggacttgaagatggaaatggaagcgagatcaattctcgcgacaatggacgaagagaagatcgactccggccagcagcggcttcaagagcttggatacaaacaggagctcaagcgctccatgtcgtaagtgcaaatttctgttctgtcattgtcaaaatctttttctgattttgcaggcctctagcaaatgtcgcgatgtgcttctcagtggtgtccatacttactggagtcactccgacgtacaacaccggccttcgatatggaggcccggtgtccatcgtttatggatggcctatagtgtgcttcttcaccatatgtattgccctgtccatggcagagatttgctcagcgtatcctacatcgggcggcctctacttctggagttacaagctcgcaggccgcaaatggggaccgtttatggcatggatgaccggatggtaagtgaaagtttcttctaagattaagtgaagcgctgaagtggtggattccaggttcaacattgctggattggtactaagatcccgttcattggtgcgcaagtctctgaacatatttgactgtaatgcagtggtcgggaacagcgagcgtttgtttctcactcgcgctgttgctacaagtgacaatccttgtaagcactggagggggtaacggaggcggctactatgcttccaagtacgtggttgtctgcatttatggtgcaatactcttgctccatggactgatcaacgggcttaatgttcgatggttttcttggctgggaaacatcgctgctttgtggaacatcttgggtaacatttcgttagcatttgcgtgtgcctttctgaggtcctgctgcaggtgtggttatgattggagctttcctactggcgcttttgcctcggcaaaaagcatcatcagtgttcagcaacctcaaccaagacagcagcaccgggattcacagcaagccatacacatttttactgggattgctcatgagccaatacacccttttggcatacgactctgcggctcacatggtacgtactttgtctttctgcatttagatgtcgaccttgacttacgaccatcttgcagtccgaggagacaaagaccgccgacaaaaccggtgg

SEQ ID NO: 14932 - DNA, 2079 bp, Volvox carteri
  Intron number 5 from transcript 90158 (locus 90158) derive d from phytozome v7.0 (chr-ID scaffold_15; pos 1603621 to 1605699 reverse strand)
tacctgcaagcaaaggttacgggggtgaggcggaggtggggcgagcacatgatggcgggggatttgaagtctacatttagtagagatgtagggcgccatggcggatcacgtggaggaaagtacggcagccgccgcgcaagttgagatgggcggaaaagaggcgcgttcaacatagcgtctataggctgcctctagctgccgtgtaggcagcaagtcctcacctcgccgaagggacagcaggaccatctccattgactgtcgtgttctgtcacgtatttttaaatacgttagagctactagcttgatagattaaactacagtcgttggtccccttcgtcttcattccctaaaggggaacttaaggggataaaccaaagtcctgctgcagctgctccaccaggtggagaaggtcgtccgcagtgtacggttggtgtccgggctgaagggcaagtcctgggtcccgagattgatgatagctatcatcaataggctggcatagcccgcaccccaaatcccaaggcttcctaacgcccgatgaaagcactaccagtctaaacctattttgaatttttccttcgcccacgtgattattcacacaaacagattgagcaggttggtaggtcgacgtggttactagtgactgtattgctggccatcatgatgccgccgaacagattatgtcatacgattgcgcaatgcataccacacatatgctattttggtaataccaagcccaacggggctgacttcttccatgctgtcgtgcgtcgatatgcatgctgtatgctgcacatgccaagcagattagatacaggtaatgaggacgctgttgtattttaaaaaatatatcttaaccttaaatcccattttacgttcaggatctgctgatgcggcttgaagtccgtgccttgcacagaacagccatcaaaactaaatcgccaacacagaaaatcaaggttaatatggttcatcacttcagattaaagagttgtgcacatactggttacaagcgtgagaatccacgtttcatttcatacgggactggggggggttcggggtgtccgggggagctcccactggtcacctgatcaacgctggcgtggcgtctggcaattcggttttactacagcttaccgcacatagtggtaccccacatacctcattaagcgcctcatccgtcgccaactttcaacagctacttcatgctggatattgttgacacgactctctgattgatttgtaagtctgatgggcgcaaaacctgcgaggtaccgatgctatggaaaagctaatcctcgacccaacttgtcaggttgtagcctgttacgtaacttattaaatgccgccttctcctacgctcgtctccgttcttcaatgtgttcgccgtttgtatctatatgttgcgttgcgtaagggaccggcatactcatgaggcccttaaatcattcgaatcatatactaattatagggctctgcatcttgcaacccaatgctagcatgtgccggcgcccggaccatgggggttgtcaaaactacacagctagatagcagcgtgggaaatgcgagcaattattcccattcttcgcaattcacatttgggctagtttcggctaaatttacatgctcttcaatgacgttcacctacgaatttttcttctgtagtgtcgtgcagcccatcggagggcgccaaagcttgccgattgccgcaatgtttggtttctttacacactgctgggtaatactgtaattcatttacatgatgtcctttgacacgatcaccgcaacatcctcctacccagcgccattgcttgcagctgcaaagtagctggttaccctttgccagacatccttcatgttgcgttgatgcaaatctattgtatcacagaaatggatgatgtcgattgacataagtttgcacgctggactgcgacaatggctgggcctcgccattttgggtttacgccgcgaccacgccgaactgacaaaacgaaatgggcgccgatcaacatcatatacgtcaccttccatacattagctcttctgttttacctgcacagctggacaccgcagttgcacagc

SEQ ID NO: 14933 - DNA, 983 bp, Volvox carteri
  Intron number 1 from transcript 91596 (locus 91596) derive d from phytozome v7.0 (chr-ID scaffold_21; pos 1868634 to 1869616)
gtggcgatcgcgcgacgcgagcaaatttaagcgaggtgcgcaaagccgtgacagaaggacgtatcttcgatcggacgcgcttgggcacctgggacgcgcttgcagctggagatgtcatgctcttttttatgagttaatttgtggctctcttcactgctgcatcgcggcctggcggtagtgcggaactgttttagcagcgctgccgcgcaccgaatagcgggaaattgcaattttatttctctggctcatcatattattcagtgattcttatggttcctttggcattaatcctgcaacactcctaccttttatcattttttgtatcccgtcgcacgatttactatcctcgcccagtatgccatacttcccttgactgctaacttgactgcttgactgcgaacatgacggatcacgcaatcgtgctcctccatcgcgcgctatatggacataatatcacgaatcgaacgaaccaggtgtcccggtgcgctttcgcgaggatgacgcacaggccccgtctacggattccgcagctgccaaacgtacaggtaaggttctggtaagcgaggctgcttaagagtgtcgatttacaacatataaccgatattccacacaggcatagattcagagaatcgttttccgaaatcctccgctgcgttgcgttgtgcgctgttgtgctgcgctgcgttgtccgccggcggtgtgctgcgaccgcgaaagcggcaacgaccattacgatgatacagaggtaaaatgtttttcatataccctgtgtacagcaacaggtaatctatatatatgaagttggtagaggggtacaacgtcatgggtggacgcgtccaggattaaagaacgacatttcgagcggtgcagcgtacagaaggttgagctattctctttcagcgtgcccttgattttcttccttgattttgtcctatgtgtttttcgtaggcgcgcatcggtcacaggtgcccgttatcctcaag

SEQ ID NO: 14934 - DNA, 847 bp, Volvox carteri
  Intron number 9 from transcript 63040 (locus 63040) derive d from phytozome v7.0 (chr-ID scaffold_32; pos 908895 to 9 09741)
gccgttcacgttgtcgctgcccttcgcgaaaactggttagttggttagtttgttggttgattcgtaatacatattgggcaatcgagtgacagttgaagggtaagggggggggtaggcgggcagtaggtgagcagcgaggctagcagcggaaattccctccattgatatgttcccctcccatcgtgcagcgcgctatcctttgtattaggaagttgctaggaagtcaggttttcagggtgtgtgtgtgtacagcttgagtatatcaatgtgtattctatacattcgatccttccctgacaacatggcgtcagttttaaaggaaattaaagaaagcgattatttacagcaatattcagcaagacggtgactgacacataaaaggaaaaaaattgcagctacaaaaacaatctcaaattaggcaaaattgcaaacggagtgggtgcactccctcgtacgacacaggtaatagtgaatgtggttgggggtgtgtggggagatcgatcacagtccccgaacacacacacagagagagagggagcctcggctggctctctctctctctctgtgtgtgtgtgtgtgtgtgtgtgtgtgtgtgtgtgtgtgtgtgtgtgtgccccagcagtacagcacgctagtttccgacaccctagtactttgaaattccaaattccaaatcctaaaaatatttaacggttatgtatagtattttaataatttcaaaaacatgaaacatacgactacttcggtcaggagaagaatgttatcgttatcgttatcttcctccctcggccgtttcggctccgggatacctttcgcagctgtgggccgcatcgccgtggacaagttc

SEQ ID NO: 14935 - DNA, 3663 bp, Volvox carteri
  Intron number 5 from transcript 99153 (locus 99153) derive d from phytozome v7.0 (chr-ID scaffold_82; pos 524779 to 5 28441)
ccgactaccttaaacctacacacacctacaccaaagtaagtgcggaaacaagccatcacttatcctagaagcatactgttcttactacgtttcttcatcactaccacaacccacttagccatcactaccactcgcgatgttatcaccctgcgtacgcgcacacacgacattctaggcctcacagactcagtcgcaacctactctccaaactagtcattcacgtcgtcgaacacataccctgaatacacatgaaatatacctcacccaacaccgcactaccgccatgacctccttaaacaaatttaccaacttctttttcctcacttttcttccaggaaccaccgacacctccaacaactcttcacaagcacaccaaccacctctaccgtccatctactaaaggtcagtttatccgtagagggctcttagcatagcaaagcacctaaacttagcgcaagagtcacctggtgaggccctggcaaggccgaaacgcgtcgtgacgtgccttgctaaatatagcttcagcagctttctttaggtcagcttgcactcgcttagcagcccatctagttctcttccagctacacctagattttctctttttttcactactttcctcgcactacacctataagactctcggcttagaccaaacccctcccggcacttatttttccttaacactcctcacctcagccaaaactccacctctatatttttacatctcacctatacgcaaaaactacttcctagccctccacacacaacataccttcgataaattatactcgtcacttttttatcccctcagcctaaaccttccaaaactctctcacaaaacaaactactttctcaaccctagctaatcgcccctaaaaagactctataacacatacctctccttccagcttctcttctttagatttttctttttagattttttcgtctaatacgaccttctaactcattactttatattttacctttaacttttactttttacttttacttttactctatatctgcgattctctttaacttcaaggtttttccctaaaactaatgagtttttatgaattcctaaaatttctaagattttcagaacttaaaaacatttccagaacttaacaagtttctaaagttaaaattttctaaagcaaaattatttaaattttttttaaagttttttgcactaacgaagggttgacctaagaaccatctaccagcagcagcccgtcccctttagtaggccgttcacgcgggattccacacgcgtggggaaatccgccgtgggaagtttcaggccagtctgctactactggcataactttttgctaatgttgacgtctgtctgcgccgcggaactgtagctttaggatggttttggcacgtgtaccgtgctcggtcttggtaatgcgcggtggtgccatgcttttgtgcgagagtcaaaagatggcaggaaaggcgatgccggaatcaggacgcgcttaggacgagcaaaacattttctgggcccatcgttgcgctttgggatgaaataagcacgctggacgtacaagtattttatgttgctgatgactttgtgtataggcttttagggaaatagcgacaaatgcaccggcatccgtggagcattagcctagcggagcttctttgaaaatgctcgtgtgctttgcaaagtttttctgcttgagcaacatgtagtttagcacgttcagacggaatgttgtctatctcctgtagggctgtctggattggtgcccttgtgcaagcacacaaactttaaatgttgcgtagatcttcgtcaaaactacttctgaaccgagctgcgtatgaattctgagttagggatgctcatcatttcaccccaaagcgcaacgatgggcccagaaaatgtttaagcagccccttcgcacaaatgtgtccggtcgtactgtgccaaataaacactccgtacaagacgcccaaaagtcaggagcgaattttgccgcgcggatgcgcgcgtgcgattcgcaaaatgcgcgtgtacaagtgtatataaatttccttggcgaaaaaggacgaggtgcgccagcgcgttgcgcaggtgggcatgttggccacagccgcacgcggcatgcaggccggaaatgtgggtggctcctttgccgtaattgaaagaactgaaatcatacaacttagcttgcaaggctgggctcatgacacggccgcgggaagaggaagcgtttggcgaagcgacacttttgtgcaagcaaacggtcgcgtttttggtagcgcaacgtatacagcaccttgttcagagtaaagtcaaattacaaagttgcgcaaagtataacatacataaacttaattaaacataagaacagataagacgtttagagccttgtcggtgacatggacgccgctgttggcttggaacagctatttgctgtgcatagggacgtgcccgcgttagccgtgttgcaacagctcaggatggatttcagccagcaacagcctcaagagctgctgcacaaccaccgggaatgtcttcagttgggcacgtgtagttttggtcggcggggtcgagcatcgtacgcattgcgcacagaaaccaaggagcagcgtctctgtaacatcgccaatatatccggtacgcggtggcaggcttgccgagcacgaaatgaaggggggtcgcatctcaccattcaactaagcatgcatgtgctcggttgaatgctcggtagcgtgcgagtttacctaacaggatgtttgtttgcatatatccctccaagcgagagggcttggacctatgctgatgttcgttacaagaagtgaactgaggactgatgctacacgtcatgtatacgcgttgcttagcttgcaacgagacgcgcccacgatgaaaagtatgcacgtaaattcgcccgtgcgccgaacgccttgtaacgcttcagataactcaatatacattatactgctacactattctctccagtcctaccacattatatttcaccgacgtacttcggcaccttccacaacaatacatgcttcgtaaacacggccacgaaagaactgaaagcatacaacgtagcttgcaagaatggccacatgaaacggctgcgggaagaggaagcgtttggcgaagcgacacttttgtgaaagcaaaggggcgcctgcatttggttgcgcaaaacatacagcatcttgttcagagcaaagtgaaattacacacttgcgcaaacaggtataacatacacaaactaaagtaataagcataagaacataaaagtcgttatgagccgtgtgggtgagatggacgccgctgatagcttggaacagctttttgatgtgcatacggccgtcatgtagtacacacccgatcagtctatgttcttacatgacgccagttcatatgctgggttgtggaagctgcgctgatgaagtgcattacaactgccaaccgtgcccagatacagctacaacattcatttaagtgtccgctgcatatgatttcatccaacaggtctgcatggtgccacagccgtccgtgtggcgcatccacatgatggctgcgtgtgcgacgacggtacagccgacacgacatccttgctgaacgatccacaagcacaccgcaatcgtgcagaacacggaaacccgtcctgcggcacaggtaagcgc

SEQ ID NO: 14936 - DNA, 689 bp, Arabidopsis thaliana
  Intron number 4 from transcript AT1G58520.1 (locus AT1G585 20) derived from phytozome v7.0 (chr-ID Chr1; pos 21734549 to 21735201)
tataggtaccggcatcattcagagactgctggtacgtatatttcttggaacagtcatttttaactaaactattacgcaggccaccttcctcttgctttacttgtcagattaaaaccgtcacctagatttattttaaaaaactgttattgctctttgtgaaaatgatttgaagttttgaacattttgccagctttaagtgttacttcttattgcagtattcattttggttgatagctttcgtagttggtgtaaatttcatggttctgaattgttatgtgctgcttggatgttataaagggttatttgatgactagatgcagagattgatgatattacatagcacagtagatataataatgaaatttagttcgtgtatcagctaaaaggggtacagtttagatgcatattctgggaatatgaaaggaccttctagagcaactctgtctgtatcctactgctgggctttcattctactgctttctgatactgtggttatttcagtatcactacatcagtttctcatttattacctgtcagcatgttgtagaaattgggtaaatgatatgtggatggtttgtgcttgtgataaagtatttgaaatttaatgttctatgtcagataaaaagtgtgacgtttagattattccaatttctgtctcagcgtgttgcggagaggaagtccatggtata

SEQ ID NO: 14937 - DNA, 331 bp, Arabidopsis thaliana
  Intron number 1 from transcript AT5G12280.2 (locus AT5G122 80) derived from phytozome v7.0 (chr-ID Chr5; pos 3973195 to 3973501 reverse strand)
tataggtaccctaagcgttcccggttgaggtacgttgccttcttatctctcaccgaaaccttaagtagtcattagcgtcgccagttcctcttctttttcctgtcgatctctttctccgcgttattatagctgccttgttggtggagattgcataagccaataattttaggtcaaatgaaattcggagaatctgattttgatgtttcatatgatttgatattcatggtgttttttcagaatttatctacgaatctgactttaatgtttattatatatatatatatatatattcctgtaaaaaaaaatgtccactccttgcagccatggtata

SEQ ID NO: 14938 - DNA, 31 bp, artificial
  synthetic sequence
tataggtaccggcatcattcagagactgctg

SEQ ID NO: 14939 - DNA, 29 bp, artificial
  synthetic sequence
tataccatggacaacctctccgcttcacg

SEQ ID NO: 14940 - DNA, 31 bp, artificial; identical to SEQ ID NO: 14938
  synthetic sequence

SEQ ID NO: 14941 - DNA, 29 bp, artificial
  synthetic sequence
tataccatggacttcctctccgcaacacg

SEQ ID NO: 14942 - DNA, 32 bp, artificial
  synthetic sequence
tataggtaccgaaagctgaaaaggctaaacaa

SEQ ID NO: 14943 - DNA, 29 bp, artificial
  synthetic sequence
tataccatgggggagcttgctttaggtgc

SEQ ID NO: 14944 - DNA, 30 bp, artificial
  synthetic sequence
tataggtaccctgcatcgttcccttcatct

SEQ ID NO: 14945 - DNA, 32 bp, artificial
  synthetic sequence
tataccatggtaaatgtgcagaggccagatta

SEQ ID NO: 14946 - DNA, 32 bp, artificial
  synthetic sequence
tataggtaccgcatcttactttcttcagaggg

SEQ ID NO: 14947 - DNA, 33 bp, artificial
  synthetic sequence
tataccatggaattgattgagttcaatttttcc

SEQ ID NO: 14948 - DNA, 29 bp, artificial
  synthetic sequence
tataggtaccctaagcgttcccggttgag

SEQ ID NO: 14949 - DNA, 32 bp, artificial
  synthetic sequence
tataccatggctttctccaactgcaaatcaat

SEQ ID NO: 14950 - DNA, 29 bp, artificial
  synthetic sequence
tataggtaccctaagcgttcccggttgag

SEQ ID NO: 14951 - DNA, 30 bp, artificial
  synthetic sequence
tataccatggctgcaaggagtggacatttt

SEQ ID NO: 14952 - DNA, 33 bp, artificial
  synthetic sequence
aaaaaggtaccatgacttcgaaagtttatgatc

SEQ ID NO: 14953 - DNA, 34 bp, artificial
  synthetic sequence
aaattgagctcttattgttcatttttgagaactc

SEQ ID NO: 14954 - DNA, 13980 bp, artificial
  vector sequence
ctatacaaagttgatagcttggcgtaatcgatgtaccgatatcaatttaaattggccggccgagctccctgcagggggcccggcgcgcctctagattaattaaaggccttagttactaatcagtgatcagattgtcgtttcccgccttcagtttaaactatcagtgtttgacaggatatattggcgggtaaacctaagagaaaagagcgtttattagaataatcggatatttaaaagggcgtgaaaaggtttatccgttcgtccatttgtatgtcaatatccatgataagtcgcgctgtatgtgtttgtttgaatattcatggaacgcagtggcggttttcatggcttgttatgactgtttttttggggtacagtctatgcctcgggcatccaagcagcaagcgcgttacgccgtgggtcgatgtttgatgttatggagcagcaacgatgttacgcagcagggcagtcgccctaaaacaaagttaaacatcatgggtgaagcggtcatcgccgaggtgtccacccagctgtcggaagtcgtgggtgtcatcgagcgccacctcgaaccgaccctcctcgccgtgcatctgtatggtagcgccgttgacggcggccttaagccccattcggacatcgacctgcttgtcaccgttaccgtccgtctcgacgagaccacgcgccgcgcgcttatcaacgaccttctggaaacgtccgcctcccccggcgagagcgaaatcctgcgcgcggttgaggtgacgattgtggtgcacgatgacatcatcccctggcgctatccggccaaacgcgaactccagttcggcgaatggcagcgtaatgatattctggcgggtatctttgaaccggccaccatcgacattgatctggcgatcctgctcaccaaggcccgggagcatagcgtggccctcgtcggccccgcggccgaggaacttttcgacccggtgccggaacaggatctgttcgaagcactgaacgagacgctgaccctgtggaactccccgccggattgggcgggcgatgagcgcaatgtggtccttacgctgagccggatttggtactcggcggttaccggcaagatcgcgccgaaggatgtcgccgccgactgggcgatggagcgccttccggcgcaataccagcccgtgatcctcgaagcgcgccaagcctatctgggccaagaagaagaccgtctcgcgtcccgggccgaccagctcgaagaatttgtccactatgtcaagggcgagatcacgaaggtcgttggcaaataatgtctagctagaaattcgttcaagccgacgccgcttcgcggcgcggcttaactcaagcgttagatgcactaagcacataattgctcacagccaaactatcgatgagttgaaggaccccgtagaaaagatcaaaggatcttcttgagatcctttttttctgcgcgtaatctgctgcttgcaaacaaaaaaaccaccgctaccagcggtggtttgtttgccggatcaagagctaccaactctttttccgaaggtaactggcttcagcagagcgcagataccaaatactgtccttctagtgtagccgtagttaggccaccacttcaagaactctgtagcaccgcctacatacctcgctctgctaatcctgttaccagtggctgctgccagtggcgataagtcgtgtcttaccgggttggactcaagacgatagttaccggataaggcgcagcggtcgggctgaacggggggttcgtgcacacagcccagcttggagcgaacgacctacaccgaactgagatacctacagcgtgagctatgagaaagcgccacgcttcccgaagggagaaaggcggacaggtatccggtaagcggcagggtcggaacaggagagcgcacgagggagcttccagggggaaacgcctggtatctttatagtcctgtcgggtttcgccacctctgacttgagcgtcgatttttgtgatgctcgtcaggggggcggagcctatggaaaaacgccagcaacgcggcctttttacggttcctggccttttgctggccttttgctcacatgttctttcctgcgttatcccctgattctgtggataaccgtattaccgcctttgagtgagctgataccgctcgccgcagccgaacgaccgagcgcagcgagtcagtgagcgaggaagcggaagagcgcctgatgcggtattttctccttacgcatctgtgcggtatttcacaccgcataggccgcgataggccgacgcgaagcggcggggcgtagggagcgcagcgaccgaagggtaggcgctttttgcagctcttcggctgtgcgctggccagacagttatgcacaggccaggcgggttttaagagttttaataagttttaaagagttttaggcggaaaaatcgccttttttctcttttatatcagtcacttacatgtgtgaccggttcccaatgtacggctttgggttcccaatgtacgggttccggttcccaatgtacggctttgggttcccaatgtacgtgctatccacaggaaagagaccttttcgacctttttcccctgctagggcaatttgccctagcatctgctccgtacattaggaaccggcggatgcttcgccctcgatcaggttgcggtagcgcatgactaggatcgggccagcctgccccgcctcctccttcaaatcgtactccggcaggtcatttgacccgatcagcttgcgcacggtgaaacagaacttcttgaactctccggcgctgccactgcgttcgtagatcgtcttgaacaaccatctggcttctgccttgcctgcggcgcggcgtgccaggcggtagagaaaacggccgatgccggggtcgatcaaaaagtaatcggggtgaaccgtcagcacgtccgggttcttgccttctgtgatctcgcggtacatccaatcagcaagctcgatctcgatgtactccggccgcccggtttcgctctttacgatcttgtagcggctaatcaaggcttcaccctcggataccgtcaccaggcggccgttcttggccttcttggtacgctgcatggcaacgtgcgtggtgtttaaccgaatgcaggtttctaccaggtcgtctttctgctttccgccatcggctcgccggcagaacttgagtacgtccgcaacgtgtggacggaacacgcggccgggcttgtctcccttcccttcccggtatcggttcatggattcggttagatgggaaaccgccatcagtaccaggtcgtaatcccacacactggccatgccggcggggcctgcggaaacctctacgtgcccgtctggaagctcgtagcggatcacctcgccagctcgtcggtcacgcttcgacagacggaaaacggccacgtccatgatgctgcgactatcgcgggtgcccacgtcatagagcatcggaacgaaaaaatctggttgctcgtcgcccttgggcggcttcctaatcgacggcgcaccggctgccggcggttgccgggattctttgcggattcgatcagcggccccttgccacgattcaccggggcgtgcttctgcctcgatgcgttgccgctgggcggcctgcgcggccttcaacttctccaccaggtcatcacccagcgccgcgccgatttgtaccgggccggatggtttgcgaccgctcacgccgattcctcgggcttgggggttccagtgccattgcagggccggcagacaacccagccgcttacgcctggccaaccgcccgttcctccacacatggggcattccacggcgtcggtgcctggttgttcttgattttccatgccgcctcctttagccgctaaaattcatctactcatttattcatttgctcatttactctggtagctgcgcgatgtattcagatagcagctcggtaatggtcttgccttggcgtaccgcgtacatcttcagcttggtgtgatcctccgccggcaactgaaagttgacccgcttcatggctggcgtgtctgccaggctggccaacgttgcagccttgctgctgcgtgcgctcggacggccggcacttagcgtgtttgtgcttttgctcattttctctttacctcattaactcaaatgagttttgatttaatttcagcggccagcgcctggacctcgcgggcagcgtcgccctcgggttctgattcaagaacggttgtgccggcggcggcagtgcctgggtagctcacgcgctgcgtgatacgggactcaagaatgggcagctcgtacccggccagcgcctcggcaacctcaccgccgatgcgcgtgcctttgatcgcccgcgacacgacaaaggccgcttgtagccttccatccgtgacctcaatgcgctgcttaaccagctccaccaggtcggcggtggcccaaatgtcgtaagggcttggctgcaccggaatcagcacgaagtcggctgccttgatcgcggacacagccaagtccgccgcctggggcgctccgtcgatcactacgaagtcgcgccggccgatggccttcacgtcgcggtcaatcgtcgggcggtcgatgccgacaacggttagcggttgatcttcccgcacggccgcccaatcgcgggcactgccctggggatcggaatcgactaacagaacatcggccccggcgagttgcagggcgcgggctagatgggttgcgatggtcgtcttgcctgacccgcctttctggttaagtacagcgataaccttcatgcgttccccttgcgtatttgtttatttactcatcgcatcatatacgcagcgaccgcatgacgcaagctgttttactcaaatacacatcacctttttagatgatcagtgattttgtgccgagctgccggtcggggagctgttggctggctggtggcaggatatattgtggtgtaaacaaattgacgcttagacaacttaataacacattgcggacgtctttaatgtactgaatttagttactgatcactgattaagtctagatattgtttttgtttcacataaatgtcgttttggattattcatgtaatattttaaactaaagtacaatttttgactactttagtttactagttaagcttttatttttttgactaaccattgaatgatgaagagatcaacgcatcatatttacaacttacatagtcttttggaagtgtaaattgctaatactacctaaaatatatctataattaactaatattttttcgtcaattataatagatcaattaaaaggctatcaaaaggaaaaaaatgaaatccacatcctgccatcataacctcatgctggaaaaagaaatgaaaaaatataaaaaatttcttttgtttattaaatttacaactttaatactagtttcttttctattttttaaaagcttttgtcacttacttaaaaaaaaaaaactttttgaaatattcctacttccaatgtctgattagtgcttctggatttcctttttggatcatgtgaatcctaaatcagaaaaattcatataatacccaattcagtatattttcatacttcaatttacaagagttctctatgtttttagcttctttcttttaagccaaatgttttaagcatcttttatacattaaaataatttagtgttgagttgagattttttttttttttttttggatttacttgttcaaaatctgaaaaaatgtttacagaaggttaaaatgaaccaaaaggcatatcaagctagattttgaattaccctatttcatcgtatacacaaaactgataatgtggacacagttgattttacttctcgatgacatcgtagttttatttaatttggaaaccacggcccatatgagcacatttcaattaaaaaccaatggtaagagcattttccatgcaagattcgagagatattaacccagtgactgttaaaacagcttagaaccctaataacgaatttcaattactcaatttaccattcgcatttcgcaataaccaaactgagccagtcacaaggagtaaaccgaaccggattatttatttataaaatgaaagaaaggaaaccaaacaacaacagcagtagtagtctgacgtaaaccaaaaagcaggcagatcaacaactaaaagaaactcaaattaccaaaacaaacaggaaattgcaaactaagtttttttaccatatgcatacaaagaccataaaaggttctgataatcaccggtttcatctctcagtatttaatccggccatctccttccgttatgacatcgttgaaagtgccaccattcgggatcatcggcaacacatgttcttggtgcggacaaatcacatccaacaggtaaggtcctggtgtatccagcattgtctgaatagcttctcggagatctgctttctttgtcaccctcgccgctggaatcccgcaagctgctgcaaacagcaacatgttcgggaatatctcgtcctcctgagccggatccccgagaaatgtgtgagctcggttagctttgtagaaccgatcttcccattgcataaccatgccaagatgctggttgtttaataaaagtaccttcactggaagattctctacacgaatagtggctagctcttgcacattcattataaagcttccatctccgtcaatatccacaactatcgcatcagggttagcaacagacgctccaatcgcagcaggaagtccaaatcccatagctccaaggcctcctgatgatagccactgccttggtttcttgtaattgtagaactgcgccgcccacatttgatgttgcccgacaccagtacttattatggcttttccatcagtcaactcatcaaggaccttaatcgcatactgtggaggaatagcttccccaaacgtcttaaagctcaacggaaacttctgtttctgtacgttcaactcattcctccaaactccaaaatcaagcttaagctcctccgctcggttctcaagaaccttattcatcccttgcaaagccagcttaacatcaccacacacagacacatgaggagtcttattcttcccaatctcagccgagtcaatatcaatatgaacaatcttagccctactagcaaaagcctcaagcttacccgtgacacgatcatcaaaccttaccccaaacgccaacaacaaatcactatgctccacagcgtaatttgcatacacagtcccatgcattccaagcatatgtaacgacaactcatcatcacaaggataagatcccagccccatcaacgtactcgcaacagggatccccgtaagctcaacaaacctacccaattcatcgctagaattcaaacaaccaccaccaacatacaacacaggcttcttagactcagaaatcaacctaacaatctgctccaaatgagaatcttccggaggtttaggcatcctagacatataaccaggtaatctcatagcctgttcccaattaggaatcgcaagctgttgttgaatatctttaggaacatcaaccaaaacaggtccaggtctaccagaagtagctaaaaagaaagcttcctcaataatcctagggatatcttcaacatccatcacaagatagttatgcttcgtaatcgaacgcgttacctcaacaatcggagtctcttgaaacgcatctgtaccaatcatacgacgagggacttgtcctgtgattgctacaagaggaacactatctaacaacgcatcggctaatccgctaacgagatttgtagctccgggacctgaagtggctatacagatacctggtttacctgaggatcgagcgtatccttctgctgcgaatacacctccttgttcgtgacgaggaaggacgttacggattgaggaagagcgggttaaggcttggtgaatctccattgatgtacctccagggtaagcgaatacggtttctacgccttgacgttctaaagcttcgacgaggatatcagcgcctttgcggggttgatctggagcgaatcgggagatgaatgtttcgggtttggtaggtttggttggagagggagtggttgtgacattggtggttgtgttgagcacggcggagatggaggagggagagctggatttgataccgcggcggcgggaggaggaggatgatttgttggggtttagggagaatgggagggagaatctggagattggtaatggtgatttggaggaggaaggagatggtttggtggagaaggagatcgaagaagatgttgttgttgttgttgttgccgccgccatggttcagctgcacatacataacatatcaagatcagaacacacatatacacacacaaatacaatcaagtcaacaactccaaaaagtccagatctacatatatacatacgtaaataacaaaatcatgtaaataatcacaatcatgtaatccagatctatgcacatatatatatacacaattaataaaaaaaatgatataacagatctatatctatgtatgtaacaacacaatcagatgagagaagtgatgttttcagatctgtatacatacaaacacaaacagatgaacaattgatacgtagatccatatgtatacgtacaattagctacacgattaaatgaaaaaaatcaacgatttcggattggtacacacaaacgcaacaatatgaagaaattcatatctgattagatataaacataaccacgtgtagatacacagtcaaatcaacaaatttatagcttctaaacggatgagatgaacaagataaagatattcacataaggcatacataagataagcagattaacaaactagcaataatacatacctaattaaaacaaggaataacagagagagagagagagagagagatttaccttgaaaatgaagaggagaagagaggatttcttaaaattgggggtagagaaagaaagatgatgaattgtgagaaaggagagatagaagggggggttgtatatataggctgtagaagattatttttgtgtttgaggcggtgaaggaagaggggatctgactatgacacgtttgcggttacgtatttcgataggagtctttcaacgcttaacgccgttactctatatgaccgtttgggccgtaacggggccgtttgttaacgctgatgttgattcttttctttctttctttcttccttttttaaagaagcaattgtacaatcgttgctagctgtcaaacggataattcggatacggatatgcctatattcatatccgtaatttttggattcgaattgactgcgatcgccaattgacgcgtactagtgtacaagcttgcggccgcgaattcggtacatccggccagtgaattatcaactatgtataataaagttgccatgattacgccaagcttgcatgcccatatgctcgaggcggccgcagatatcagatctggtcgacctagaggatccccgggtaccccactttgtacaagaaagctgggtccatgattacgccaagcttgaattcccgatctagtaacatagatgacaccgcgcgcgataatttatcctagtttgcgcgctatattttgttttctatcgcgtattaaatgtataattgcgggactctaatcataaaaacccatctcataaataacgtcatgcattacatgttaattattacatgcttaacgtaattcaacagaaattatatgataatcatcgcaagaccggcaacaggattcaatcttaagaaactttattgccaaatgtttgaacgatcggggaaattcgagcccatatgctcgagttacacggcgatctttccgcccttcttggcctttatgaggatctctctgatttttcttgcgtcgagttttccggtaagacctttcggtacttcgtccacaaacacaactcctccgcgcaactttttcgcggttgttacttgactggcgacgtaatccacgatctctttttccgtcatcgtctttccgtgctccaaaacaacaacggcggcgggaagttcaccggcgtcatcgtcgggaagacctgcgacacctgcgtcgaagatgttggggtgttggagcaagatggattccaattcagcgggagccacctgatagcctttgtacttaatcagagacttcaggcggtcaacgatgaagaagtgttcgtcttcgtcccagtaagctatgtctccagaatgtagccatccatccttgtcaatcaaggcgttggtcgcttccggattgtttacataaccggacataatcataggacctctcacacacagttcgcctctttgattaacgcccagcgttttcccggtatccagatccacaaccttcgcttcaaaaaatggaacaactttaccgaccgcgcccggtttatcatccccctcgggtgtaatcagaatagctgatgtagtctcagtgagcccatatccttgcctgatacctggcagatggaacctcttggcaaccgcttccccgacttccttagagaggggagcgccaccagaagcaatttcgtgtaaattagataaatcgtatttgtcaatcagagtgcttttggcgaagaaggagaatagggttggcaccagcagcgcactttgaatcttgtaatcctgaaggctcctcagaaacagctcttcttcaaatctatacattaagacgactcgaaatccacatatcaaatatccgagtgtagtaaacattccaaaaccgtgatggaatggaacaacacttaaaatcgcagtatccggaatgatttgattgccaaaaataggatctctggcatgcgagaatctcacgcaggcagttctatgaggcagagcgacacctttaggcagaccagtagatccagaggagttcatgatcagtgcaattgtcttgtccctatcgaaggactctggcacaaaatcgtattcattaaaaccgggaggtagatgagatgtgacgaacgtgtacatcgactgaaatccctggtaatccgttttagaatccatgataataattttttggatgattgggagctttttttgcacgttcaaaattttttgcaacccctttttggaaacgaacaccacggtaggctgcgaaatgcccatactgttgagcaattcacgttcattataaatgtcgttcgcgggcgcaactgcaactccgataaataacgcgcccaacaccggcataaagaattgaagagagttttcactgcatacgacgattctgtgatttgtattcagcccatatcgtttcatagcttctgccaaccgaacggacatttcgaagtactcagcgtaagtgatgtccacctcgatatgtgcatctgtaaaagcaattgttccaggaaccagggcgtatctcttcatagccttatgcagttgctctccagcggttccatcttccagcggatagaatggcgccgggcctttctttatgtttttggcgtcttccatggacaacctctccgcttcacgctgagacagaaattggaataatctaaacgtcacactttttatctgacatagaacattaaatttcaaatactttatcacaagcacaaaccatccacatatcatttacccaatttctacaacatgctgacaggtaataaatgagaaactgatgtagtgatactgaaataaccacagtatcagaaagcagtagaatgaaagcccagcagtaggatacagacagagttgctctagaaggtcctttcatattcccagaatatgcatctaaactgtaccccttttagctgatacacgaactaaatttcattattatatctactgtgctatgtaatatcatcaatctctgcatctagtcatcaaataaccctttataacatccaagcagcacataacaattcagaaccatgaaatttacaccaactacgaaagctatcaaccaaaatgaatactgcaataagaagtaacacttaaagctggcaaaatgttcaaaacttcaaatcattttcacaaagagcaataacagttttttaaaataaatctaggtgacggttttaatctgacaagtaaagcaagaggaaggtggcctgcgtaatagtttagttaaaaatgactgttccaagaaatatacgtaccagcagtctctgaatgatgccggtaccagcctgcttttttgtacaaacttgactcgagtctttgttttttactttggttcatgacactcagagacttgagagaagcaatatatagacttttttttgttttttttttgtggtcacgtttattttcctattggagacggtaacgaagatcgaacctgtggtggaaatgaaacaaggtgggactagcccacgtggtttcttttctctgcattgatttgtttttgttttttttgtaaagttcacatcaaacctactaataattgagaagaaaaataaaatctattgattgattaaaccagccgatgctttatgtctgaatataaaaaagaagtgaaaaccccgtttaagaattacaacggtggtttacaaagtatttggacacaataaatccaaacgaaataaaacaaaatggagaactaccaaataaaaaacaaataaaaaacttaaaagaatttattccattttttttcccgtagaatttattcttttatggattccttaaatccatatttgatgcattttgattcctcataataggtaataatatatactatgttatagatatgtttctaattcgtattaacctacctttttttggtcgtacgattctacctaataatattgaacggaattgatgttttggaccacttagaaagtattttttttttggtttgtcttagctgtatttcattaaatataaatttaaataagaaatgtcataaataaaatttgacgtatagattttttaaatccattttatgttatttaatatttgaaatgtgagtttggctcctatttaatcttaggatgggttaatactaagttttccttaatgaattatctcagagaaactggattaaataaactaaaaaatagatcaatgtgttttggtccggtcaaatatctttggatttactattattggcgaaaagaaagtctcatatagtaaatcatattcctacaagagaaatcaaaatttttgaattaacatggattgtatagtttcttatataaccaattagttcgcatcaagaaaaccaaaccccaattaataatcaaacgggcttggtaggaatatttcattgcagctttcagataaaagaaaaaaacacacactcaagtcttttatttcatctttcttacttgcaggaactcaaattccactttgccacttttctttacaaataaacacaaattgtcaatgaaacgaaatagtctttttatgcaaacactgtttgtcttttttcgatcacgtttctgattgtgacagccatccatatatatagggaatgtaaaacaacaacatgtgaagtcacatatacgtaatggtttagcatagcttctattttcgttgtcaatattagtcattccaaaacatttttaagaaaaataaattaatatatgtatattcttggaactaatgtatgtggaaatacagtaacttaattattaaacattctaaatgcaaatatgcaaagaaaaaaaagaaaagaacacaactgaaatcaaagccagattcataataattggctacatggttgtagaatgtagggtaacacaacatccagaattgaacactcaaattggatgatagatggataatctttagatacaagagaattggttctcttccattattaacgaaaataaagaaaaaaagtttagcataaaagtttgaaactcaacataacattttgaacttgactccttcataggagtgacatgaactgacgaatcacaaccgattacttgtttgagtcatcttccgctttctccaccttcgaaatgaatgtgaccggtttcttcgggtgctcatttacggtcaagtgtaaaacatctggtctcgagtaatgtccaaccgaatcgaagtacaacttagctcttgctacatcaccaagatcttgatgcaactttt

SEQ ID NO: 14955 - DNA, 51 bp, artificial
  synthetic sequence
ggggacaactttgtatagaaaagttgtcgagaccagatgttttacacttga

SEQ ID NO: 14956 - DNA, 51 bp, artificial
  synthetic sequence
ggggactgcttttttgtacaaacttggacactcagagacttgagagaagca

SEQ ID NO: 14957 - DNA, 73 bp, artificial
  synthetic sequence
ggtacccggggatcctctagcatatgctcgaggcggccgcagatatcagatctggtcgacggcatgcaagctt

SEQ ID NO: 14958 - DNA, 691 bp, Arabidopsis thaliana
  Intron number 1 from transcript AT5G06960.1 (locus AT5G069 60) derived from phytozome v7.0 (chr-ID Chr5; pos 2155011 to 2155695)
tatatataggtaccgttaagctcaaagaatccgttcttttcaggtgagtctcttcttcaatagtcttaggggttttagttcttcagttttcttattctgcctctgctttcatgattgtttttttccattgaagattttgacctttgagggaattttttcctttttgctttatgtacgtgttaaggatccaaaatcattatttcggacactatttaaacgaattggttgagatttgatgttatgaagcttgaattttgtgtcttttactctgtttccggggctagtttgctaaattctgaatcttttagctctacttcagtctaatgttcagattagttactgtttcacctcacggagagctttacgctatagaagtccgttggttctcatttcaaatcatataggcgtgcttattgtttactttgattctctggctttgaatactcaaagttcttgaggtcattggttgcttcacagctatgtgttaagtttagtggtttggatctttatgttagtgtgacataaatagggtgatgtatcgtatcattgtttccactttcttgattctacttaatgcgttggtttttggcttaaaaatatgttttctttctctataactctaatcttttgtttatgtttaccatcttacttttgacagtctttactccatctagggtaccacgatccatgg

SEQ ID NO: 14959 - DNA, 547 bp, Arabidopsis thaliana
  Intron number 1 from transcript AT1G54290.1 (locus AT1G542 90) derived from phytozome v7.0 (chr-ID Chr1; pos 20269396 to 20269938 reverse strand)
tataggtaccctcgaaaccctaatctcttcttgatcaggtgatactttctctctttctgctgaatgattgtttcctgttgatttgcttgttcgaaaaagtttttatttagagatttgtaggtcattttattttctgatctgaatgcagctctttttggttcaaaatatatactctgggttttgtttcttcgcaaaatgataatgtttgattgttttttctttcagaagaaattgactccaaaactagatatgttatttattctgtagaaaatggtatcgaattttagatacagatactatattttttgttttgatttttgattttggaatcttgtgatatgtttacgcaatggagacttttgcagaaaatggtttctttattatttgttatatgaatctttgattatctgaataagacattgctaggataaccagtgtcacttttttttacgttatgtaacttgaaatcatttttggactcgtaattctaacattctgtttttgttctcaggccttgtcgatttactgtcccttgtaccatggtata

SEQ ID NO: 14960 - DNA, 925 bp, Arabidopsis thaliana
  Intron number 1 from transcript AT4G19410.1 (locus AT4G194 10) derived from phytozome v7.0 (chr-ID Chr4; pos 10584767 to 10585662 reverse strand)
tataggtacccaagaagaggactccattttcgcaaggtatgcttcatttgtatcgatctttttatagttctgcaagtttgatatgtactcagaataaattgaatattttgttttagtcttgttagttagaactacagtatatattactattagccatttaggatttcaagaagattgcatattaatatcagatcattaatgtgaatgacatcgaaggttacttcggggaattgataatttgaaacgattcaacacatttctctgcgatccaacaagttgaatatgaataaggggatgatatgatttttcttacatagtaaaagttgagatgatgtgaaagggtatttttggtatctcaagatacaagcatcccataatagcgattagcaatttttttttttttttttttttttgtcaaaccgattagcaatgttaagtaatgaattatgatagatttgtaatgataataattgtttagtgctctacactctgagcaaggttataattacagacaactagaaaagttggtctgagaaaagctataagatatttaaagacgcacatggacgatggatgtctttttgtttgtttgttttgttcttggctagttatcacatttgacatttctgataatctacttttgaatagtctaaatttccaatttgtaataacgtggattcgaggaatcttaaaacaatggattacataatagtataattataaaaaatattatccactcgaaaatgtaggtaatttcaaaataaataaatttgtcagtccgcatgttaccatatgaaagcagtaattaattcgcattagaaatgtactattatattattattgaaattaaccaaatcgtaagcttgtttatttatttattttccaaaaaatgatagattggggaggcttaagcaaccatggtata

SEQ ID NO: 14961 - DNA, 33 bp, artificial
  synthetic sequence
tataggtaccgttaagctcaaagaatccgttct

SEQ ID NO: 14962 - DNA, 33 bp, artificial
  synthetic sequence
tataccatggatcgtggtaccctagatggagta

SEQ ID NO: 14963 - DNA, 33 bp, artificial
  synthetic sequence
tataggtaccctcgaaaccctaatctcttcttg

SEQ ID NO: 14964 - DNA, 34 bp, artificial
  synthetic sequence
tataccatggtacaagggacagtaaatcgacaag

SEQ ID NO: 14965 - DNA, 32 bp, artificial
  synthetic sequence
tataggtacccaagaagaggactccattttcg

SEQ ID NO: 14966 - DNA, 29 bp, artificial
  synthetic sequence
tataccatggttgcttaagcctccccaat
